(19) United States
(12) Patent Application Publication
(10) Pub. No.: US 2007/0128592 A1
(43) Pub. Date: Jun. 7, 2007

(54) Method and nucleic acids for the analysis of a lung cell proliferative disorder

(75) Inventors: Matthias Burger, Berlin (DE); John K. Field, Wirral (IE); Bulent Genc, Berlin (DE); Triantafillos Liloglou, Liverpool (GB); Evelyne Lipscher, Berlin (DE); Sabine Maier, Berlin (DE); Inko Nimmrich, Berlin (DE)

Correspondence Address: DAVIS WRIGHT TREMAINE, LLP, 2600 CENTURY SQUARE, 1501 FOURTH AVENUE, SEATTLE, WA, 98101-1688, US

(73) Assignee: Epigenomics AG, Berlin (DE)

(21) Appl. No.: 10/498,430

(22) PCT Filed: Dec. 10, 2002
(86) PCT No.: PCT/EP02/14026

§ 371 Date: Dec. 21, 2005

(30) Foreign Application Priority Data
Dec. 14, 2001 (DE) 101 61 625.2

(51) Int. Cl. C12Q 1/68

(52) U.S. Cl. 435/6

(57) ABSTRACT

The present invention relates to modified and genomic sequences, to oligonucleotides and/or PNA-oligomers for detecting the cytosine methylation state of genomic DNA, as well as to a method for ascertaining genetic and/or epigenetic parameters of genes for use in the differentiation, diagnosis, treatment and/or monitoring of lung cell proliferative disorders, or the predisposition to lung cell proliferative disorders.

### FIELD OF THE INVENTION

[0001] The levels of observation that have been studied by the methodological developments of recent years in molecular biology, are the genes themselves, the translation of these genes into RNA, and the resulting proteins. The question of which gene is switched on at which point in the course of the development of an individual, and how the activation and inhibition of specific genes in specific cells and tissues are controlled is correlatable to the degree and character of the methylation of the genes or of the genome. In this respect, pathogenic conditions may manifest themselves in a changed methylation pattern of individual genes or of the genome.

[0002] The present invention relates to nucleic acids, oligonucleotides, PNA-oligomers, and to a method for the analysis of lung cell proliferative disorders, the differentiation between subclasses of said disorder or the detection of a predisposition to said disorders, by analysis of the genetic and/or epigenetic parameters of genomic DNA and, in particular, with the cytosine methylation status thereof.

[0003] Lung cancer is among the most commonly occurring malignancies in the world and is one of the few that continues to show an increasing incidence. In men it is the leading cause of of death in Western countries. In 2000, the incidence in the US is estimated to be 164 000 new cases and 157 000 deaths from the disease. 5 year survival rates are only 14% in the US (Ginsberg et al., Principles & Practice of Oncology. 6^{th} Edition). The most prominent risk factor is smoking, around 80% of lung cancer deaths among men and 75% among women are likely to be attributable to smoking (Minna et al., Cancer: principles and practice of oncology, 3^{rd} ed., 1989).

[0004] Lung cancer falls into two major histologic classes, small cell lung cancer and non-small cell lung cancer. The latter one represents 82% of lung cancer cases (Murren et al., Principles & Practice of Oncology. 6^{th} Edition) and can be further subclassified into squamous cell carcinoma, once the most frequent of all lung cancers in North America, and adenocarcinoma, to which 40% of new lung cancer cases can be attributed (Ginsberg et al., Principles & Practice of Oncology. 6^{th} Edition). Squamous cell carcinoma arises most frequently in the proximal segmental bronchi. Because of the ability of squamous cells to exfoliate, this tumour can be detected by cytologic examination of sputum. Adenocarcinoma usually arises more peripherally and has a somewhat worse prognosis compared to squamous cell carcinoma.

[0005] Because of the poor prognosis of lung cancer, identification of patients at an early stage, where the disease can still be cured, is of outstanding importance. Currently, most patients present with metastatic (stage IV) disease (Ginsberg et al., Principles & Practice of Oncology. 6^{th} Edition). Sputum or bronchoalveolar lavage analysis, imaging techniques from conventional chest radiography to spiral computed tomography, percutaneous fine-needle aspiration, bronchoscopy are used to diagnose patients in whom the disease is suspected. Whereas helical computed tomographic scans are particularly successful in picking up small peripheral adenocarcinomas that cannot yet be visualised by standard chest x-rays, cytologic examination of sputum provides a high sensitivity for central squamous cell lesions. However, because of their invasiveness, radiation exposure and, above all, the high number of false positives, these methods are currently only applied in a very small subset of individuals known to be at high risk for the disease or if symptoms are already present.

[0006] In the last decade, knowledge has accumulated on molecular alterations which occur during progression from dysplasia or atypia to cancerous lesions of the lung. These alterations include chromosomal abnormalities such as deletions of 3p, 9p and 17p (Sekido et al., Principles & Practice of Oncology. 6^{th} Edition), microsatellite instability (Sekido et al., Biochim Biophys Acta 1998, 1378: F21), activation of protooncogenes, e.g. EGFR, ERBB2, KIT, and MET (Rusch et al., Clin Cancer Res 1997, 3:515, Tsai et al., Cancer Res 1996, 56:206, Krystal et al., Cancer Res 1998, 58:4660), inactivation of tumor suppressor genes like p53 (Bennett et al., J Pathol 1999, 187:8), p16 (Sekido et al., Biochim Biophys Acta 1998, 1378: F21, Belinsky et al., PNAS USA 1998, 95: 11891) and RB (Reissmann et al., Oncogene 1993, 8:1913). One of the earliest molecular alterations in tumorigenesis is aberrant DNA methylation. In a recent study, Dai and coworkers were able to show that out of 1184 CpG islands screened by RLGS analysis up to 5.3% are methylated in some non-small cell lung cancers. In addition, aberrant methylation could be detected not only in the tumour itself, but also in different body fluids, such as serum (Esteller et al., Cancer Res, 1999, 59:67) and bronchoalveolar lavage samples (Ahrendt et al., J Natl Cancer Inst 91:332).

[0007] Molecular markers offer the advantage that even samples of very small sizes and samples whose tissue architecture has not been maintained, e.g. very small biopsies or single cells can be analysed quite efficiently. In addition, molecular alterations identified in different tumour types can be detected also in body fluids such as serum, plasma, sputum or bronchoalveolar lavage, probably much earlier than cytological analysis. Detailed knowledge of the molecular pathogenesis of a disease also offers the possibility to develop new drugs targeted specifically at alterations occurring at a specific stage in the disease.

[0008] Aberrant DNA methylation within CpG islands is common in human malignancies leading to abrogation or overexpression of a broad spectrum of genes (Jones, P. A. Cancer Res 65:2463-2467, 1996). Abnormal methylation has also been shown to occur in CpG rich regulatory elements in intronic and coding parts of genes for certain tumours (Chan, M. F., et al., Curr Top Microbiol Immunol 249:75-86,2000). Highly characteristic DNA methylation patterns could also be shown for breast cancer cell lines (Huang, T. H.-M., et al., Hum Mol Genet 8:459-470, 1999). Large-scale methylation analysis has not been applied to lymphomas so far, but alterations of the methylation of single genes have been described in several subtypes of Non-Hodgkin lymphoma, e.g. TCL1 (Yuille et al., Genes Chromosomes Cancer 2001, 30:336-41), p15 and AR (Baur et al., Blood. 1999, 94:1773-81, Martinez-Delgado et al., Leukemia 1998 12:937-41), the androgen receptor (McDonald et al., Genes Chromosomes Cancer. 2000 28:246-57), and the MyoD1 gene (Taylor et al., Leukemia. 2001, 15:583-9).

[0009] 5-methylcytosine is the most frequent covalent base modification in the DNA of eukaryotic cells. It plays a role, for example, in the regulation of the transcription, in genetic imprinting, and in tumorigenesis. Therefore, the identification of 5-methylcytosine as a component of genetic information is of considerable interest. However, 5-methylcytosine positions cannot be identified by sequencing since 5-methylcytosine has the same base pairing behaviour as cytosine. Moreover, the epigenetic information carried by 5-methylcytosine is completely lost during PCR amplification.

[0010] A relatively new and currently the most frequently used method for analysing DNA for 5-methylcytosine is based upon the specific reaction of bisulfite with cytosine which, upon subsequent alkaline hydrolysis, is converted to uracil which corresponds to thymidine in its base pairing behaviour. However, 5-methylcytosine remains unmodified under these conditions.

[0011] Consequently, the original DNA is converted in such a manner that methylcytosine, which originally could not be distinguished from cytosine by its hybridisation behaviour, can now be detected as the only remaining cytosine using “normal” molecular biological techniques, for example, by amplification and hybridisation or sequencing. All of these techniques are based on base pairing which can now be fully exploited. In terms of sensitivity, the prior art is defined by a method which encloses the DNA to be analysed in an agarose matrix, thus preventing the diffusion and renaturation of the DNA (bisulfite only reacts with single-stranded DNA), and which replaces all precipitation and purification steps with fast dialysis (Olek A, Oswald J, Walter J. A modified and improved method for bisulphite based cytosine methylation analysis. Nucleic Acids Res. 1996 Dec. 15; 24(24):5064-6). Using this method, it is possible to analyse individual cells, which illustrates the potential of the method. However, currently only individual regions of a length of up to approximately 3000 base pairs are analyzed, a global analysis of cells for thousands of possible methylation events is not possible. However, this method cannot reliably analyse very small fragments from small sample quantities either. These are lost through the matrix in spite of the diffusion protection.

[0012] An overview of the further known methods of detecting 5-methylcytosine may be gathered from the following review article: Rein, T., DePamphilis, M. L., Zorbas, H., Nucleic Acids Res. 1998, 26, 2255.

[0013] To date, barring few exceptions (e.g., Zeschnigk M, Lich C, Buiting K, Doerfler W, Horsthemke B. A single-tube PCR test for the diagnosis of Angelman and Prader-Willi syndrome based on allelic methylation differences at the SNRPN locus. Eur J Hum Genet. 1997 March-April; 5(2):94-8) the bisulfite technique is only used in research. Always, however, short, specific fragments of a known gene are amplified subsequent to a bisulfite treatment and either completely sequenced (Olek A, Walter J. The pre-implantation ontogeny of the H19 methylation imprint. Nat Genet. 1997 November; 17(3):275-6) or individual cytosine positions are detected by a primer extension reaction (Gonzalgo M L, Jones P A. Rapid quantitation of methylation differences at specific sites using methylation-sensitive single nucleotide primer extension (Ms-SNuPE). Nucleic Acids Res. 1997 Jun. 15; 25(12):2529-31, WO 95/00669) or by enzymatic digestion (Xiong Z, Laird P W. COBRA: a sensitive and quantitative DNA methylation assay. Nucleic Acids Res. 1997 Jun. 15; 25(12):2532-4). In addition, detection by hybridisation has also been described (Olek et al., WO 99/28498).

[0014] Further publications dealing with the use of the bisulfite technique for methylation detection in individual genes are: Grigg G, Clark S. Sequencing 5-methylcytosine residues in genomic DNA. Bioessays. 1994 June; 16(6):431-6, 431; Zeschnigk M, Schmitz B, Dittrich B, Buiting K, Horsthemke B, Doerfler W. Imprinted segments in the human genome: different DNA methylation patterns in the Prader-Willi/Angelman syndrome region as determined by the genomic sequencing method. Hum Mol Genet 1997 March; 6(3):387-95; Feil R, Charlton J, Bird A P, Walter J, Reik W. Methylation analysis on individual chromosomes: improved protocol for bisulphite genomic sequencing. Nucleic Acids Res. 1994 Feb. 25; 22(4):695-6; Martin V, Ribieras S, Song-Wang X, Rio M C, Dante R. Genomic sequencing indicates a correlation between DNA hypomethylation in the 5′ region of the pS2 gene and its expression in human breast cancer cell lines. Gene. 1995 May 19; 157(1-2):261-4; WO 97/46705, WO 95/15373, and WO 97/45560.

[0015] An overview of the Prior Art in oligomer array manufacturing can be gathered from a special edition of Nature Genetics (Nature Genetics Supplement, Volume 21, January 1999), published in January 1999, and from the literature cited therein.

[0016] Fluorescently labelled probes are often used for the scanning of immobilised DNA arrays. The simple attachment of Cy3 and Cy5 dyes to the 5′-OH of the specific probe are particularly suitable for fluorescence labels. The detection of the fluorescence of the hybridised probes may be carried out, for example via a confocal microscope. Cy3 and Cy5 dyes, besides many others, are commercially available.

[0017] Matrix Assisted Laser Desorption Ionization Mass Spectrometry (MALDI-TOF) is a very efficient development for the analysis of biomolecules (Karas M, Hillenkamp F. Laser desorption ionisation of proteins with molecular masses exceeding 10,000 daltons. Anal Chem. 1988 Oct. 15; 60(20):2299-301). An analyte is embedded in a light-absorbing matrix. The matrix is evaporated by a short laser pulse thus transporting the analyte molecule into the vapour phase in an unfragmented manner. The analyte is ionised by collisions with matrix molecules. An applied voltage accelerates the ions into a field-free flight tube. Due to their different masses, the ions are accelerated at different rates. Smaller ions reach the detector sooner than bigger ones.

[0018] MALDI-TOF spectrometry is excellently suited to the analysis of peptides and proteins. The analysis of nucleic acids is somewhat more difficult (Gut I G, Beck S. DNA and Matrix Assisted Laser Desorption Ionization Mass Spectrometry. Current Innovations and Future Trends. 1995, 1; 147-57). The sensitivity to nucleic acids is approximately 100 times worse than to peptides and decreases disproportionally with increasing fragment size. For nucleic acids having a multiply negatively charged backbone, the ionisation process via the matrix is considerably less efficient. In MALDI-TOF spectrometry, the selection of the matrix plays an eminently important role. For the desorption of peptides, several very efficient matrixes have been found which produce a very fine crystalisation. There are now several responsive matrixes for DNA, however, the difference in sensitivity has not been reduced. The difference in sensitivity can be reduced by chemically modifying the DNA in such a manner that it becomes more similar to a peptide. Phosphorothioate nucleic acids in which the usual phosphates of the backbone are substituted with thiophosphates can be converted into a charge-neutral DNA using simple alkylation chemistry (Gut I G, Beck S. A procedure for selective DNA alkylation and detection by mass spectrometry. Nucleic Acids Res. 1995 Apr. 25; 23(8):1367-73). The coupling of a charge tag to this modified DNA results in an increase in sensitivity to the same level as that found for peptides. A further advantage of charge tagging is the increased stability of the analysis against impurities which make the detection of unmodified substrates considerably more difficult.

[0019] Genomic DNA is obtained from DNA of cell, tissue or other test samples using standard methods. This standard methodology is found in references such as Fritsch and Maniatis eds., Molecular Cloning: A Laboratory Manual, 1989.

### DESCRIPTION

[0020] The invention provide a method for the analysis of biological samples for features associated with the development of lung cell proliferative disorders, characterised in that the nucleic acid of at least one member of the group comprising MDR1, APOC2, CACNA1G, EGR4, AR, RB1, GP1b beta, MYOD1, WT1, HLA-F, ELK1, APC, ARHI, BCL2, BRCA1, CALCA, CCND2, CDH1, CDKN1B, CDKN2a, CDKN2B, CD44, CSPG2, DAPK1, GGT1, GSTP1, HIC-1, LAP18, LKB1, LOC51147, MGMT, MLH1, MNCA9, MYC, N33, PAX6, PGR, PTEN, RARB, SFN, S100A2, TFF1, TGFBR2, TIMP3, VHL, CDKN1C, CAV1, CDH13, NDRG1, PTGS2, THBS1, TMEFF2, PLAU, DNMT1, ESR1, APAF1, HOXA5 and RASSF1 is/are contacted with a reagent or series of reagents capable of distinguishing between methylated and non methylated CpG dinucleotides within the genomic sequence of interest.

[0021] The present invention makes available a method for ascertaining genetic and/or epigenetic parameters of genomic DNA. The method is for use in the improved diagnosis, treatment and monitoring of lung cell proliferative disorders, more specifically by enabling the improved identification of and differentiation between subclasses of said disorder and the genetic pre-disposition to said disorders. The invention presents improvements over the state of the art in that it enables a highly specific classification of lung carcinomas, thereby allowing for improved and informed treatment of patients.

[0022] In a particularly preferred embodiment the present invention makes available methods and nucleic acids that allow the differentiation between squamous cell carcinoma, and adenocarcinoma and their respective adjacent lung tissues.

[0023] Furthermore, the method enables the analysis of cytosine methylations and single nucleotide polymorphisms.

[0024] In a preferred embodiment, the method comprises the following steps:

[0025] In the first step of the method the genomic DNA sample must be isolated from tissue or cellular sources. Such sources may include lung tissue samples, cell lines, histological slides, body fluids, or tissue embedded in paraffin. Extraction may be by means that are standard to one skilled in the art, these include the use of detergent lysates, sonification and vortexing with glass beads. Once the nucleic acids have been extracted the genomic double stranded DNA is used in the analysis.

[0026] In a preferred embodiment the DNA may be cleaved prior to the next step of the method, this may be by any means standard in the state of the art, in particular, but not limited to, with restriction endonucleases.

[0027] In the second step of the method, the genomic DNA sample is treated in such a manner that cytosine bases which are unmethylated at the 5′-position are converted to uracil, thymidine, or another base which is dissimilar to cytosine in terms of hybridisation behaviour. This will be understood as ‘pretreatment’ hereinafter.

[0028] The above described treatment of genomic DNA is preferably carried out with bisulfite (sulfite, disulfite) and subsequent alkaline hydrolysis which results in a conversion of non-methylated cytosine nucleobases to uracil or to another base which is dissimilar to cytosine in terms of base pairing behaviour. If bisulfite solution is used for the reaction, then an addition takes place at the non-methylated cytosine bases. Moreover, a denaturating reagent or solvent as well as a radical interceptor must be present. A subsequent alkaline hydrolysis then gives rise to the conversion of non-methylated cytosine nucleobases to uracil. The chemically converted DNA is then used for the detection of methylated cytosines.

[0029] Fragments of the pretreated DNA are amplified, using sets of primer oligonucleotides according to SEQ ID NO: 308 to SEQ ID NO: 427, and a, preferably heat-stable, polymerase. Because of statistical and practical considerations, preferably more than ten different fragments having a length of 100-2000 base pairs are amplified. The amplification of several DNA segments can be carried out simultaneously in one and the same reaction vessel. Usually, the amplification is carried out by means of a polymerase chain reaction (PCR).

[0030] The method may also be enabled by the use of alternative primers, the design of such primers is obvious to one skilled in the art. These should include at least two oligonucleotides whose sequences are each reverse complementary or identical to an at least 18 base-pair long segment of the base sequences specified in the appendix (SEQ ID NO:76 to SEQ ID NO: 307). Said primer oligonucleotides are preferably characterised in that they do not contain any CpG dinucleotides. In a particularly preferred embodiment of the method, the sequence of said primer oligonucleotides are designed so as to selectively anneal to and amplify, only the lung tissue specific DNA of interest, thereby minimising the amplification of background or non relevant DNA. In the context of the present invention, background DNA is taken to mean genomic DNA which does not have a relevant tissue specific methylation pattern, in this case, the relevant tissue being lung, both healthy and diseased.

[0031] According to the present invention, it is preferred that at least one primer oligonucleotide is bound to a solid phase during amplification. The different oligonucleotide and/or PNA-oligomer sequences can be arranged on a plane solid phase in the form of a rectangular or hexagonal lattice, the solid phase surface preferably being composed of silicon, glass, poly-styrene, aluminium, steel, iron, copper, nickel, silver, or gold, it being possible for other materials such as nitrocellulose or plastics to be used as well.

[0032] The fragments obtained by means of the amplification can carry a directly or indirectly detectable label. Preferred are labels in the form of fluorescence labels, radionuclides, or detachable molecule fragments having a typical mass which can be detected in a mass spectrometer, it being preferred that the fragments that are produced have a single positive or negative net charge for better detectability in the mass spectrometer. The detection may be carried out and visualised by means of matrix assisted laser desorption/ionisation mass spectrometry (MALDI) or using electron spray mass spectrometry (ESI).

[0033] The amplificates obtained in the second step of the method are subsequently hybridised to an array or a set of oligonucleotides and/or PNA probes. In this context, the hybridisation takes place in the manner described as follows. The set of probes used during the hybridisation is preferably composed of at least 10 oligonucleotides or PNA-oligomers. In the process, the amplificates serve as probes which hybridise to oligonucleotides previously bonded to a solid phase. In a particularly preferred embodiment, the oligonucleotides are taken from the group comprising SEQ ID NO: 428 to SEQ ID NO: 917. In a further preferred embodiment the oligonucleotides are taken from the group comprising SEQ ID NO: 884 to SEQ ID NO: 917. The non-hybridised fragments are subsequently removed. Said oligonucleotides contain at least one base sequence having a length of 10 nucleotides which is reverse complementary or identical to a segment of the base sequences specified in the appendix, the segment containing at least one CpG or TpG dinucleotide. In a further preferred embodiment the cytosine of the CpG dinucleotide, or in the case of TpG, the thymidine, is the 5^{th} to 9^{th} nucleotide from the 5′-end of the 10-mer. One oligonucleotide exists for each CpG or TpG dinucleotide.

[0034] In the fifth step of the method, the non-hybridised amplificates are removed.

[0035] In the final step of the method, the hybridised amplificates are detected. In this context, it is preferred that labels attached to the amplificates are identifiable at each position of the solid phase at which an oligonucleotide sequence is located.

[0036] According to the present invention, it is preferred that the labels of the amplificates are fluorescence labels, radionuclides, or detachable molecule fragments having a typical mass which can be detected in a mass spectrometer. The mass spectrometer is preferred for the detection of the amplificates, fragments of the amplificates or of probes which are complementary to the amplificates, it being possible for the detection to be carried out and visualised by means of matrix assisted laser desorption/ionisation mass spectrometry (MALDI) or using electron spray mass spectrometry (ESI). The produced fragments may have a single positive or negative net charge for better detectability in the mass spectrometer.

[0037] The aforementioned method is preferably used for ascertaining genetic and/or epigenetic parameters of genomic DNA.

[0038] In order to enable this method, the invention further provides the modified DNA of genes MDR1, APOC2, CACNA1G, EGR4, AR, RB1, GP1b beta, MYOD1, WT1, HLA-F, ELK1, APC, ARHI, BCL2, BRCA1, CALCA, CCND2, CDH1, CDKN1B, CDKN2a, CDKN2B, CD44, CSPG2, DAPK1, GGT1, GSTP1, HIC-1, LAP18, LKB1, LOC51147, MGMT, MLH1, MNCA9, MYC, N33, PAX6, PGR, PTEN, RARB, SFN, S100A2, TFF1, TGFBR2, TIMP3, VHL, CDKN1C, CAV1, CDH13, NDRG1, PTGS2, THBS1, TMEFF2, PLAU, DNMT1, ESR1, APAF1, HOXA5 and RASSF1 as well as oligonucleotides and/or PNA-oligomers for detecting cytosine methylations within said genes. The present invention is based on the discovery that genetic and epigenetic parameters and, in particular, the cytosine methylation patterns of genomic DNA are particularly suitable for improved diagnosis, treatment and monitoring of lung cell proliferative disorders. Furthermore, the invention enables the differentiation between different subclasses of lung carcinomas or detection of a predisposition to lung carcinomas.

[0039] The nucleic acids according to the present invention can be used for the analysis of genetic and/or epigenetic parameters of genomic DNA.

[0040] This objective is achieved according to the present invention using a nucleic acid containing a sequence of at least 18 bases in length of the pretreated genomic DNA according to one of SEQ ID NO: 76 through SEQ ID NO: 307 and sequences complementary thereto.

[0041] The modified nucleic acid could heretofore not be connected with the ascertainment of disease relevant genetic and epigenetic parameters.

[0042] The object of the present invention is further achieved by an oligonucleotide or oligomer for the analysis of pretreated DNA, for detecting the genomic cytosine methylation state, said oligonucleotide containing at least one base sequence having a length of at least 10 nucleotides which hybridises to a pretreated genomic DNA according to SEQ ID NO: 76 to SEQ ID NO: 307. The oligomer probes according to the present invention constitute important and effective tools which, for the first time, make it possible to ascertain specific genetic and epigenetic parameters during the analysis of biological samples for features associated with the development of lung cell proliferative disorders. Said oligonucleotides allow the improved diagnosis, treatment and monitoring of lung cell proliferative disorders and detection of the predisposition to said disorders. Furthermore, they allow the differentiation of different subclasses of lung carcinomas. The base sequence of the oligomers preferably contains at least one CpG or TpG dinucleotide. The probes may also exist in the form of a PNA (peptide nucleic acid) which has particularly preferred pairing properties. Particularly preferred are oligonucleotides according to the present invention in which the cytosine of the CpG dinucleotide is the 5^{th}-9^{th} nucleotide from the 5′-end of the 13-mer; in the case of PNA-oligomers, it is preferred for the cytosine of the CpG dinucleotide to be the 4^{th}-6^{th} nucleotide from the 5′-end of the 9-mer.

[0043] The oligomers according to the present invention are normally used in so called “sets” which contain at least one oligomer for each of the CpG dinucleotides within SEQ ID NO: 76 to SEQ ID NO: 307. Preferred is a set which contains at least one oligomer for each of the CpG dinucleotides, from SEQ ID NO: 428 to SEQ ID NO: 917. Further preferred is a set comprising SEQ ID NO: 884 to SEQ ID NO: 917.

[0044] In the case of the sets of oligonucleotides according to the present invention, it is preferred that at least one oligonucleotide is bound to a solid phase. It is further preferred that all the oligonucleotides of one set are bound to a solid phase.

[0045] The present invention moreover relates to a set of at least 10 n (oligonucleotides and/or PNA-oligomers) used for detecting the cytosine methylation state of genomic DNA using treated versions of said genomic DNA (according to SEQ ID NO: 76 to SEQ ID NO: 307 and sequences complementary thereto). These probes enable improved diagnosis, treatment and monitoring of lung cell proliferative disorders. In particular they enable the differentiation between different sub classes of lung cell proliferative disorders and the detection of a predisposition to said disorders. In a particularly preferred embodiment the set comprises SEQ ID NO: 59 to SEQ ID NO: 917.

[0046] The set of oligomers may also be used for detecting single nucleotide polymorphisms (SNPs) using pretreated genomic DNA according to one of SEQ ID NO: 76 to SEQ ID NO: 307.

[0047] According to the present invention, it is preferred that an arrangement of different oligonucleotides and/or PNA-oligomers (a so-called “array”) made available by the present invention is present in a manner that it is likewise bound to a solid phase. This array of different oligonucleotide- and/or PNA-oligomer sequences can be characterised in that it is arranged on the solid phase in the form of a rectangular or hexagonal lattice. The solid phase surface is preferably composed of silicon, glass, polystyrene, aluminium, steel, iron, copper, nickel, silver, or gold. However, nitrocellulose as well as plastics such as nylon which can exist in the form of pellets or also as resin matrices are suitable alternatives.

[0048] Therefore, a further subject matter of the present invention is a method for manufacturing an array fixed to a carrier material for the improved diagnosis, treatment and monitoring of lung cell proliferative disorders, the differentiation between different subclasses of lung carcinomas and/or detection of the predisposition to lung cell proliferative disorders. In said method at least one oligomer according to the present invention is coupled to a solid phase. Methods for manufacturing such arrays are known, for example, from U.S. Pat. No. 5,744,305 by means of solid-phase chemistry and photolabile protecting groups.

[0049] A further subject matter of the present invention relates to a DNA chip for the improved diagnosis, treatment and monitoring of lung cell proliferative disorders. Furthermore the DNA chip enables detection of the predisposition to lung cell proliferative disorders and the differentiation between different subclasses of lung carcinomas. The DNA chip contains at least one nucleic acid according to the present invention. DNA chips are known, for example, in U.S. Pat. No. 5,837,832.

[0050] Moreover, a subject matter of the present invention is a kit which may be composed, for example, of a bisulfite-containing reagent, a set of primer oligonucleotides containing at least two oligonucleotides whose sequences in each case correspond or are complementary to a 18 base long segment of the base sequences specified in the appendix (SEQ ID NO: 76 to SEQ ID NO: 307), oligonucleotides and/or PNA-oligomers as well as instructions for carrying out and evaluating the described method. However, a kit along the lines of the present invention can also contain only part of the aforementioned components.

[0051] The oligomers according to the present invention or arrays thereof as well as a kit according to the present invention are intended to be used for the improved diagnosis, treatment and monitoring of lung cell proliferative disorders. Furthermore the use of said inventions extends to the differentiation between different subclasses of lung carcinomas and detection of the predisposition to lung cell proliferative disorders. According to the present invention, the method is preferably used for the analysis of important genetic and/or epigenetic parameters within genomic DNA, in particular for use in improved diagnosis, treatment and monitoring of lung cell proliferative disorders, detection of the predisposition to said disorders and the differentiation between subclasses of said disorders.

[0052] The methods according to the present invention are used, for example, for improved diagnosis, treatment and monitoring of lung cell proliferative disorders progression, detection of the predisposition to said disorders and the differentiation between subclasses of said disorders.

[0053] A further embodiment of the invention is a method for the analysis of the methylation status of genomic DNA without the need for pretreatment. In the first step of the method the genomic DNA sample must be isolated from tissue or cellular sources. Such sources may include cell lines, histological slides, body fluids, or tissue embedded in paraffin. Extraction may be by means that are standard to one skilled in the art, these include the use of detergent lysates, sonification and vortexing with glass beads. Once the nucleic acids have been extracted the genomic double stranded DNA is used in the analysis.

[0054] In a preferred embodiment the DNA may be cleaved prior to the treatment, this may be any means standard in the state of the art, in particular with restriction endonucleases. In the second step, the DNA is then digested with one or more methylation sensitive restriction enzymes. The digestion is carried out such that hydrolysis of the DNA at the restriction site is informative of the methylation status of a specific CpG dinucleotide.

[0055] In the third step the restriction fragments are amplified. In a preferred embodiment this is carried out using a polymerase chain reaction.

[0056] In the final step the amplificates are detected. The detection may be by any means standard in the art, for example, but not limited to, gel electrophoresis analysis, hybridisation analysis, incorporation of detectable tags within the PCR products, DNA array analysis, MALDI or ESI analysis.

[0057] The present invention moreover relates to the diagnosis and/or prognosis of events which are disadvantageous or relevant to patients or individuals in which important genetic and/or epigenetic parameters within genomic DNA, said parameters obtained by means of the present invention may be compared to another set of genetic and/or epigenetic parameters, the differences serving as the basis for the diagnosis and/or prognosis of events which are disadvantageous or relevant to patients or individuals.

[0058] In the context of the present invention the term “hybridisation” is to be understood as a bond of an oligonucleotide to a completely complementary sequence along the lines of the Watson-Crick base pairings in the sample DNA, forming a duplex structure.

[0059] In the context of the present invention, “genetic parameters” are mutations and polymorphisms of genomic DNA and sequences further required for their regulation. To be designated as mutations are, in particular, insertions, deletions, point mutations, inversions and polymorphisms and, particularly preferred, SNPs (single nucleotide polymorphisms).

[0060] In the context of the present invention, “epigenetic parameters” are, in particular, cytosine methylations and further modifications of DNA bases of genomic DNA and sequences further required for their regulation. Further epigenetic parameters include, for example, the acetylation of histones which, cannot be directly analysed using the described method but which, in turn, correlates with the DNA methylation.

[0061] In the following, the present invention will be explained in greater detail on the basis of the figures, sequences and examples without being limited thereto.

[0062] FIG. 1

[0063] FIG. 1 shows the differentiation between adenocarcinoma and adjacent tissues according to Example 2. The labels on the left side of the plot are gene and CpG identifiers, these can be cross referenced in Table 3. The labels on the right side give the significance (p-value, T-test) of the difference between the means of the two groups. Each row corresponds to a single CpG and each column to the methylation levels of one sample. CpGs are ordered according to their contribution to the differentiation between the two tissue types with increasing contribution from top to bottom. Black indicates total methylation at a given CpG position, white represents no methylation at the particular position, with degrees of methylation represented in grey, from light (low proportion of methylation) to dark (high proportion of methylation).

[0064] FIG. 2

[0065] FIG. 2 shows the differentiation of squamous cell carcinoma tissue from adjacent tissues using informative CpG-Positions from 9 genes. Informative CpG-Positions are further described in Table 4. P-values are obtained using the Wilcoxon test. The labels on the left side of the plot are gene and CpG identifiers, these can be cross referenced in Table 4. The labels on the right side give the significance (p-value, T-test) of the difference between the means of the two groups. Each row corresponds to a single CpG and each column to the methylation levels of one sample. CpGs are ordered according to their contribution to the differentiation between the two tissue types with increasing contribution from top to bottom. Black indicates total methylation at a given CpG position, white represents no methylation at the particular position, with degrees of methylation represented in grey, from light (low proportion of methylation) to dark (high proportion of methylation).

[0066] FIG. 3

[0067] FIG. 3 shows the differentiation between adenocarcinoma and squamous cell carcinoma according to Example 2. The labels on the left side of the plot are gene and CpG identifiers, these can be cross referenced in Table 5. The labels on the right side give the significance (p-value, T-test) of the difference between the means of the two groups. Each row corresponds to a single CpG and each column to the methylation levels of one sample. CpGs are ordered according to their contribution to the distinction to the differential diagnosis between the two carcinomas with increasing contribution from top to bottom. Black indicates total methylation at a given CpG position, white represents no methylation at the particular position, with degrees of methylation represented in grey, from light (low proportion of methylation) to dark (high proportion of methylation).

[0068] SEQ ID NO: 1 to SEQ ID NO: 58 represent 5′ and/or regulatory regions of the genomic DNA of genes MDR1, APOC2, CACNA1G, EGR4, AR, RB1, GP1b beta, MYOD1, WT1, HLA-F, ELK1, APC, ARHI, BCL2, BRCA1, CALCA, CCND2, CDH1, CDKN1B, CDKN2a, CDKN2B, CD44, CSPG2, DAPK1, GGT1, GSTP1, HIC-1, LAP18, LKB1, LOC51147, MGMT, MLH1, MNCA9, MYC, N33, PAX6, PGR, PTEN, RARB, SFN, S100A2, TFF1, TGFBR2, TIMP3, VHL, CDKN1C, CAV1, CDH13, NDRG1, PTGS2, THBS1, TMEFF2, PLAU, DNMT1, ESR1, APAF1, HOXA5 and RASSF1. These sequences are derived from Genbank and will be taken to include all minor variations of the sequence material which are currently unforeseen, for example, but not limited to, minor deletions and SNPs.

[0069] SEQ ID NO: 76 to SEQ ID NO: 307 exhibit the pretreated sequence of DNA derived from genes MDR1, APOC2, CACNA1G, EGR4, AR, RB1, GP1b beta, MYOD1, WT1, HLA-F, ELK1, APC, ARHI, BCL2, BRCA1, CALCA, CCND2, CDH1, CDKN1B, CDKN2a, CDKN2B, CD44, CSPG2, DAPK1, GGT1, GSTP1, HIC-1, LAP18, LKB1, LOC51147, MGMT, MLH1, MNCA9, MYC, N33, PAX6, PGR, PTEN, RARB, SFN, S100A2, TFF1, TGFBR2, TIMP3, VHL, CDKN1C, CAV1, CDH13, NDRG1, PTGS2, THBS1, TMEFF2, PLAU, DNMT1, ESR1, APAF1, HOXA5 and RASSF1. These sequences will be taken to include all minor variations of the sequence material which are currently unforeseen, for example, but not limited to, minor deletions and SNPs.

[0070] SEQ ID NO: 308 to SEQ ID NO:427 exhibit the sequence of primer oligonucleotides for the amplification of pretreated DNA according to SEQ ID NO: 76 to SEQ ID NO:307.

[0071] SEQ ID NO: 428 to SEQ ID NO: 917 exhibit the sequence of oligomers which are useful for the analysis of CpG positions within genomic DNA according to SEQ ID NO: 1 to SEQ ID NO: 58.

[0072] SEQ ID NO: 884 to SEQ ID NO: 917 exhibit the sequence of oligomers which are useful for the analysis of CpG positions within genomic DNA according to SEQ ID NO: 1 to SEQ ID NO: 58.

### EXAMPLE

### Examples 1 and 2

### Digital Phenotype

[0073] In the following examples, multiplex PCR was carried out on samples from patients with adenocarcinoma or squamous cell carcinoma. Multiplex PCR was also carried out upon normal tissue adjacent to the carcinoma. Each sample was treated in the manner described below in Example 1 in order to deduce the methylation status of CpG positions, the CpG methylation information for each sample was collated and then used in an analysis, as detailed in Example 2. An alternative method for the analysis of CpG methylation status is further described in Example 3.

### Example 1

[0074] In the first step the genomic DNA was isolated from the cell samples using the Wizzard kit from (Promega).

[0075] The isolated genomic DNA from the samples are treated using a bisulfite solution (hydrogen sulfite, disulfite). The treatment is such that all non methylated cytosines within the sample are converted to thymidine, conversely 5-methylated cytosines within the sample remain un-modified.

[0076] The treated nucleic acids were then amplified using multiplex PCRs, amplifying 8 fragments per reaction with Cy5 fluorescently labelled primers. PCR primers used are described in Table 1. PCR conditions were as follows.

Reaction Solution:

[0077] 10 ng bisulfite treated DNA
[0078] 3.5 mM MgCl₂
[0079] 400 μM dNTPs
[0080] 2 pmol each primer
[0081] 1 U Hot Start Taq (Qiagen)

[0082] Forty cycles were carried out as follows. Denaturation at 95° C. for 15 min, followed by annealing at 55° C. for 45 sec., primer elongation at 65° C. for 2 min. A final elongation at 65° C. was carried out for 10 min.

[0083] All PCR products from each individual sample were then hybridised to glass slides carrying a pair of immobilised oligonucleotides for each CpG position under analysis. Each of these detection oligonucleotides was designed to hybridise to the bisulphite converted sequence around one CpG site which was either originally unmethylated (TG) or methylated (CG). See Table 2 for further details of all hybridisation oligonucleotides used (both informative and non-informative). Hybridisation conditions were selected to allow the detection of the single nucleotide differences between the TG and CG variants.

[0084] 5 μl volume of each multiplex PCR product was diluted in 10× Ssarc buffer (10× Ssarc: 230 ml 20×SSC, 180 ml sodium lauroyl sarcosinate solution 20% , dilute to 1000 ml with dH2O). The reaction mixture was then hybridised to the detection oligonucleotides as follows. Denaturation at 95° C., cooling down to 10° C., hybridisation at 42° C. overnight followed by washing with 10× Ssarc and dH2O at 42° C.

[0085] Fluorescent signals from each hybridised oligonucleotide were detected using genepix scanner and software. Ratios for the two signals (from the CG oligonucleotide and the TG oligonucleotide used to analyse each CpG position) were calculated based on comparison of intensity of the fluorescent signals.

### Example 2

[0086] The data obtained according to Example 1 is then sorted into a ranked matrix (as shown in FIGS. 1 to 3) according to CpG methylation differences between the two classes of tissues, using an algorithm. The most significant CpG positions are at the bottom of the matrix with significance decreasing towards the top. Black indicates total methylation at a given CpG position, white represents no methylation at the particular position, with degrees of methylation represented in grey, from light (low proportion of methylation) to dark (high proportion of methylation). Each row represents one specific CpG position within a gene and each column shows the methylation profile for the different CpGs for one sample. On the left side a CpG and gene identifier is shown this may be cross referenced with the accompanying table (Tables 3 to 5) in order to ascertain the gene in question and the detection oligomer used. On the right side p values for the individual CpG positions are shown. The p values are the probabilities that the observed distribution occurred by chance in the data set.

[0087] For selected distinctions, we trained a learning algorithm (support vector machine, SVM. The SVM (as discussed by F. Model, P. Adorjan, A. Olek, C. Piepenbrock, Feature selection for DNA methylation based cancer classification. Bioinformatics. 2001 June; 17 Suppl 1:S157-64) constructs an optimal discriminant between two classes of given training samples. In this case each sample is described by the methylation patterns (CG/TG ratios) at the investigated CpG sites. The SVM was trained on a subset of samples of each class, which were presented with the diagnosis attached. Independent test samples, which were not shown to the SVM before were then presented to evaluate, if the diagnosis can be predicted correctly based on the predictor created in the training round. This procedure was repeated several times using different partitions of the samples, a method called crossvalidation. Please note that all rounds are performed without using any knowledge obtained in the previous runs. The number of correct classifications was averaged over all runs, which gives a good estimate of our test accuracy (percent of correct classified samples over all rounds).

Adenocarcinoma Compared to Adjacent Tissue (FIG. 1)

[0088] FIG. 1 shows the differentiation of Adenocarcinoma tissue from adjacent tissue using informative CpG positions from 4 genes. Informative CpG positions are further described in Table 3. P values are obtained using the Wilcoxon test.

Squamous Cell Carcinoma Compared to Adjacent Tissue (FIG. 2)

[0089] FIG. 2 shows the differentiation of squamous cell carcinoma tissue from adjacent tissue using informative CpG positions from 9 genes. Informative CpG positions are further described in Table 4. P values are obtained using the Wilcoxon test.

Squamous Cell Carcinoma Compared to Adenocarcinoma (FIG. 3)

[0090] FIG. 3 shows the differentiation of squamous cell carcinoma from adenocarcinoma. Discrimination between the two classes of carcinomas was possible using CpG positions within two genes. Informative CpG positions are further described in Table 5. P values are obtained using the Wilcoxon test.

### Example 3

### Identification of the Methylation Status of a CpG Site within the Gene RARB

[0091] A fragment of the gene RARB was PCR amplified using primers TTCGGATTTTACCATTT (SEQ ID NO: ) and CCTCCCCTGCTCATTTT (SEQ ID NO: ). The resultant fragment (531 bp in length) contained an informative CpG at position 198. The amplificate DNA was digested with the restriction endonuclease AvaI, recognition site CYCGRG. Hydrolysis by said endonuclease is blocked by methylation of the CpG at position 198 of the amplificate. The digest was used as a control.

[0092] Genomic DNA was isolated from sample using the DNA wizard DNA isolation kit (Promega). Each sample was digested using AvaI according to manufacturer's recommendations (New England Biolabs).

[0093] 10 ng of each genomic digest was then amplified using PCR primers TTCGGACCTTTTACCATTT (SEQ ID NO: ) and CCTCCCCTGCTCATTTT (SEQ ID NO: ). The PCR reactions were performed using a thermocycler (Eppendorf GmbH) using 10 ng of DNA, 6 pmole of each primer, 200 μM of each dNTP, 1.5 mM MgCl2 and 1 U of HotstartTaq (Qiagen AG). The other conditions were as recommended by the Taq polymerase manufacturer. Using the above mentioned primers, gene fragments were amplified by PCR performing a first denaturation step for 14 min at 96° C., followed by 30-45 cycles (step 2: 60 sec at 96° C., step 3: 45 sec at 52° C. , step 4: 75 sec at 72° C.) and a subsequent final elongation of 10 min at 72° C. The presence of PCR products was analysed by agarose gel electrophoresis.

[0094] PCR products were detectable with AvaI hydrolysed DNA isolated wherein the CpG position in question was up-methylated, when step 2 to step 4 of the cycle program were repeated 34, 37, 39, 42 and 45 fold. In contrast PCR products were only detectable with AvaI hydrolysed DNA isolated from down-methylated DNA (and control DNA) when step 2 to step 4 of the cycle program were repeated 42- and 45-fold. These results were incorporated into a CpG methylation matrix analysis as described in Example 2.

### Tables

[0095] TABLE 1
PCR primers and products

| | | | Primer | |
|---|---|---|---|---|
| No: | Gene | Primer: | type: | Size: |
| 1 | MDR1 | TAAGTATGTTGAAGAAAGATTATTGTAG | start | 633 |
| | (SEQ ID NO: 1) | (SEQ ID NO: 308) | | |
| | | TAAAAACTATCCCATAATAACTCCCAAC | stop | |
| | | (SEQ ID NO: 309) | | |
| 2 | APOC2 | ATGAGTAGAAGAGGTGATAT | start | 533 |
| | (SEQ ID NO: 2) | (SEQ ID NO: 310) | | |
| | | CCCTAAATCCCTTTCTTACC | stop | |
| | | (SEQ ID NO: 311) | | |
| 3 | CACNA1G | GGGATTTAAGAGAAATTGAGGTA | start | 707 |
| | (SEQ ID NO: 3) | (SEQ ID NO: 312) | | |
| | | AAACCCCAAACATCCTTTAT | stop | |
| | | (SEQ ID NO: 313) | | |
| 4 | EGR4 | AGGGGGATTGAGTGTTAAGT | start | 293 |
| | (SEQ ID NO: 4) | (SEQ ID NO: 315) | | |
| | | CCCAAACATAAACACAAAAT | stop | |
| | | (SEQ ID NO: 314) | | |
| 5 | AR | GTAGTAGTAGTAGTAAGAGA | start | 460 |
| | (SEQ ID NO: 5) | (SEQ ID NO: 316) | | |
| | | ACCCCCTAAATAATTATCCT | stop | |
| | | (SEQ ID NO: 317) | | |
| 6 | RB1 | TTTAAGTTTGTTTTTGTTTTGGT | start | 718 |
| | (SEQ ID NO: 6) | (SEQ ID NO: 318) | | |
| | | TCCTACTCTAAATCCTCCTCAA | stop | |
| | | (SEQ ID NO: 319) | | |
| 7 | GPIb beta | GGTGATAGGAGAATAATGTTGG | start | 379 |
| | (SEQ ID NO: 7) | (SEQ ID NO: 320) | | |
| | | TCCTCCCAACTACAACCAAAC | stop | |
| | | (SEQ ID NO: 321) | | |
| 8 | MYOD1 | ATTAGGGGTATAGAGGAGTATTGA | start | 883 |
| | (SEQ ID NO: 8) | (SEQ ID NO: 322) | | |
| | | CTTACAAACCCACAATAAACAA | stop | |
| | | (SEQ ID NO: 323) | | |
| 9 | WT1 | AAAGGGAAATTAAGTGTTGT | start | 747 |
| | (SEQ ID NO: 9) | (SEQ ID NO: 325) | | |
| | | TAACTACCCTCAACTTCCC | stop | |
| | | (SEQ ID NO: 324) | | |
| 10 | HLA-F | TTGTTGTTTTTAGGGGTTTTGG | start | 946 |
| | (SEQ ID NO: 10) | (SEQ ID NO: 326) | | |
| | | TCCTTCCCATTCTCCAAATATC | stop | |
| | | (SEQ ID NO: 327) | | |
| 11 | ELK1 | AAGTGTTTTAGTTTTTAATGGGTA | start | 966 |
| | (SEQ ID NO: 11) | (SEQ ID NO: 328) | | |
| | | CAAACCCAAAACTCACCTAT | stop | |
| | | (SEQ ID NO: 329) | | |
| 12 | APC | AGGAAGTATTGAAGATGAAGTTATG | start | |
| | (SEQ ID NO: 12) | (SEQ ID NO: 330) | | |
| | | TTCCAATAAAACAATAAACTC | stop | |
| | | (SEQ ID NO: 331) | | |
| 13 | ARHI | GTGAGTTTTTGGGGTGTTTA | start | 442 |
| | (SEQ ID NO: 13) | (SEQ ID NO: 332) | | |
| | | TCAATCTTACTTTCACACTACATAA | stop | |
| | | (SEQ ID NO: 333) | | |
| 14 | BCL2 | GTATTTTATGTTAAGGGGGAAA | start | 640 |
| | SEQ ID NO: 14) | SEQ ID NO: 334) | | |
| | | AAAAACCACAATCCTCCC | stop | |
| | | SEQ ID NO: 335) | | |
| 15 | BRCA1 | TGGATGGGAATTGTAGTTTT | start | 537 |
| | (SEQ ID NO: 15) | (SEQ ID NO: 336) | | |
| | | TTAACCACCCAATCTACCC | stop | |
| | | (SEQ ID NO: 337) | | |
| 16 | CACLA | GTTTTGGAAGTATGAGGGTG | start | 614 |
| | (SEQ ID NO: 16) | (SEQ ID NO: 338) | | |
| | | CCAAATTCTAAACCAATTTCC | stop | |
| | | (SEQ ID NO: 339) | | |
| 17 | CCND2 | TTTTGGTATGTAGGTTGGATG | start | 426 |
| | (SEQ ID NO: 17) | (SEQ ID NO: 340) | | |
| | | CCTAACCTCCTTCCTTTAACT | stop | |
| | | (SEQ ID NO: 341) | | |
| 18 | CDH1 | CAAATAAACCCTCAACCAATC | start | 474 |
| | (SEQ ID NO: 18) | (SEQ ID NO: 342) | | |
| | | TGGAGGGGGTAGGAAAGT | stop | |
| | | (SEQ ID NO: 343) | | |
| 19 | CDKN1B | GTGGGGAGGTAGTTGAAGA | start | 478 |
| | (SEQ ID NO: 19) | (SEQ ID NO: 344) | | |
| | | ATACACCCCTAACCCAAAAT | stop | |
| | | (SEQ ID NO: 345) | | |
| 20 | CDKN2a | TTGAAAATTAAGGGTTGAGG | start | 598 |
| | (SEQ ID NO: 20) | (SEQ ID NO: 346) | | |
| | | CACCCTCTAATAACCAACCA | stop | |
| | | (SEQ ID NO: 347) | | |
| 21 | CDKN2a | GGGGTTGGTTGGTTATTAGA | start | 256 |
| | (SEQ ID NO: 20) | (SEQ ID NO: 348) | | |
| | | AACCCTCTACCCACCTAAAT | stop | |
| | | (SEQ ID NO: 349) | | |
| 22 | CDKN2B | GGTTGGTTGAAGGAATAGAAAT | start | 708 |
| | (SEQ ID NO: 21) | (SEQ ID NO: 350) | | |
| | | CCCACTAAACATACCCTTATTC | stop | |
| | | (SEQ ID NO: 351) | | |
| 23 | CD44 | GAAAGGAGAGGTTAAAGGTTG | start | 696 |
| | (SEQ ID NO: 22) | (SEQ ID NO: 352) | | |
| | | AACTCACTTAACTCCAATCCC | stop | |
| | | (SEQ ID NO: 353) | | |
| 24 | CSPG2 | GGATAGGAGTTGGGATTAAGAT | start | 414 |
| | (SEQ ID NO: 23) | (SEQ ID NO: 354) | | |
| | | AAATCTTTTTCAACACCAAAAT | stop | |
| | | (SEQ ID NO: 355) | | |
| 25 | DAPK1 | AACCCTTTCTTCAAATTACAAA | start | 348 |
| | (SEQ ID NO: 24) | (SEQ ID NO: 356) | | |
| | | TGATTGGGTTTTAGGGAAATA | stop | |
| | | (SEQ ID NO: 357) | | |
| 26 | GGT1 | GTGAAGGGTGTGAGTTGTTTA | start | 562 |
| | (SEQ ID NO: 25) | (SEQ ID NO: 358) | | |
| | | CACAATCAATTTCCCACAA | stop | |
| | | (SEQ ID NO: 359) | | |
| 27 | GSTP1 | ATTTGGGAAAGAGGGAAAG | start | 300 |
| | (SEQ ID NO: 26) | (SEQ ID NO: 360) | | |
| | | TAAAAACTCTAAACCCCATCC | stop | |
| | | (SEQ ID NO: 361) | | |
| 28 | HIC-1 | TGGGTTGGAGAAGAAGTTTA | start | 280 |
| | (SEQ ID NO: 27) | (SEQ ID NO: 362) | | |
| | | TCATATTTCCAAAAACACACC | stop | |
| | | (SEQ ID NO: 363) | | |
| 29 | LAP18 | GAGTTTGTATTTAAGTTGAGTGGTT | start | 334 |
| | (SEQ ID NO: 28) | (SEQ ID NO: 364) | | |
| | | AACAAAACAATACCCCTTCTAA | stop | |
| | | (SEQ ID NO: 365) | | |
| 30 | LKB1 | TAAAAGAAGGATTTTTGATTGG | start | 528 |
| | (SEQ ID NO: 29) | (SEQ ID NO: 367) | | |
| | | CATCTTATTTACCTCCCTCCC | stop | |
| | | (SEQ ID NO: 366) | | |
| 31 | LOC51147 | ATTAGGGATGAGAGGATTTGTA | start | 212 |
| | (SEQ ID NO: 30) | (SEQ ID NO: 368) | | |
| | | TCTTCCTAACCATACACACTAACC | stop | |
| | | (SEQ ID NO: 369) | | |
| 32 | MGMT | AAGGTTTTAGGGAAGAGTGTTT | start | 636 |
| | (SEQ ID NO: 31) | (SEQ ID NO: 370) | | |
| | | ACCTTTTCCTATCACAAAAATAA | stop | |
| | | (SEQ ID NO: 371) | | |
| 33 | MLH1 | TAAGGGGAGAGGAGGAGTTT | start | 545 |
| | (SEQ ID NO: 32) | (SEQ ID NO: 372) | | |
| | | ACCAATTCTCAATCATCTCTTT | stop | |
| | | (SEQ ID NO: 373) | | |
| 34 | MNCA9 | GGGAAGTAGGTTAGGGTTAGTT | start | |
| | (SEQ ID NO: 33) | (SEQ ID NO: 374) | | |
| | | AAATCCTCCTCTCCAAATAAAT | stop | |
| | | (SEQ ID NO: 375) | | |
| 35 | MYC | AGAGGGAGTAAAAGAAAATGGT | start | 712 |
| | (SEQ ID NO: 34) | (SEQ ID NO: 376) | | |
| | | CCAAATAAACAAAATAACCTCC | stop | |
| | | (SEQ ID NO: 377) | | |
| 36 | N33 | TTTTAGATTGAGGTTTTAGGGT | start | 497 |
| | (SEQ ID NO: 35) | (SEQ ID NO: 378) | | |
| | | ATCCATTCTACCTCCTTTTTCT | stop | |
| | | (SEQ ID NO: 379) | | |
| 37 | PAX6 | GGAGGGGAGAGGGTTATG | start | 374 |
| | (SEQ ID NO: 36) | (SEQ ID NO: 380) | | |
| | | TACTATACACACCCCAAAACAA | stop | |
| | | (SEQ ID NO: 381) | | |
| 38 | PGR | TTTTGGGAATGGGTTGTAT | start | 369 |
| | (SEQ ID NO: 37) | (SEQ ID NO: 382) | | |
| | | CTACCCTTAACCTCCATCCTA | stop | |
| | | (SEQ ID NO: 383) | | |
| 39 | PTEN | TTTTAGGTAGTTATATTGGGTATGTT | start | 346 |
| | (SEQ ID NO: 38) | (SEQ ID NO: 384) | | |
| | | TCAACTCTCAAACTTCCATCA | stop | |
| | | (SEQ ID NO: 385) | | |
| 40 | RARB | TTGTTGGGAGTTTTTAAGTTTT | start | 353 |
| | (SEQ ID NO: 39) | (SEQ ID NO: 386) | | |
| | | CAAATTCTCCTTCCAAATAAAT | stop | |
| | | (SEQ ID NO: 387) | | |
| 41 | SFN | GAAGAGAGGAGAGGGAGGTA | start | 489 |
| | (SEQ ID NO: 40) | (SEQ ID NO: 389) | | |
| | | CTATCCAACAAACCCAACA | stop | |
| | | (SEQ ID NO: 388) | | |
| 42 | S100A2 | GTTTTTAAGTTGGAGAAGAGGA | start | 460 |
| | (SEQ ID NO: 41) | (SEQ ID NO: 390) | | |
| | | ACCTATAAATCACAACCCACTC | stop | |
| | | (SEQ ID NO: 391) | | |
| 43 | TFF1 | GGTTTTGGTGTTTATGTTGGT | start | |
| | (SEQ ID NO: 42) | (SEQ ID NO: 393) | | |
| | | AAATCCCTACAAAAATATCTAAAA | stop | |
| | | (SEQ ID NO: 392) | | |
| 44 | TGFBR2 | GTAATTTGAAGAAAGTTGAGGG | start | 296 |
| | (SEQ ID NO: 43) | (SEQ ID NO: 394) | | |
| | | CCAACAACTAAACAAAACCTCT | stop | |
| | | (SEQ ID NO: 395) | | |
| 45 | TIMP3 | TGAGAAAATTGTTGTTTGAAGT | start | 306 |
| | (SEQ ID NO: 44) | (SEQ ID NO: 396) | | |
| | | CAAAATACCCTAAAAACCACTC | stop | |
| | | (SEQ ID NO: 397) | | |
| 46 | VHL | TGTAAAATGAATAAAGTTAATGAGTG | start | 362 |
| | (SEQ ID NO: 45) | (SEQ ID NO: 398) | | |
| | | TCCTAAATTCAAATAATCCTCCT | stop | |
| | | (SEQ ID NO: 399) | | |
| 47 | CDKN1C | GGGGAGGTAGATATTTGGATAA | start | 300 |
| | (SEQ ID NO: 46) | (SEQ ID NO: 400) | | |
| | | AACTACACCATTTATATTCCCAC | stop | |
| | | (SEQ ID NO: 401) | | |
| 48 | CAV1 | GTTAGTATGTTTGGGGGTAAAT | start | 435 |
| | (SEQ ID NO: 47) | (SEQ ID NO: 403) | | |
| | | ATAAATAACACCTTCCACCCTA | stop | |
| | | (SEQ ID NO: 402) | | |
| 49 | CDH13 | TTTGTATTAGGTTGGAAGTGGT | start | 286 |
| | (SEQ ID NO: 48) | (SEQ ID NO: 404) | | |
| | | CCCAAATAAATCAACAACAACA | stop | |
| | | (SEQ ID NO: 405) | | |
| 50 | NDRG1 | GGTTTTGGGTTTAGTGGTAAAT | start | 416 |
| | (SEQ ID NO: 49) | (SEQ ID NO: 407) | | |
| | | AACTTTCATAACTCACCCTTTC | stop | |
| | | (SEQ ID NO: 406) | | |
| 51 | PTGS2 | GATTTTTGGAGAGGAAGTTAAG | start | 381 |
| | (SEQ ID NO: 50) | (SEQ ID NO: 409) | | |
| | | AAAACTAAAAACCAAACCCATA | stop | |
| | | (SEQ ID NO: 408) | | |
| 52 | THBS1 | TGGGGTTAGTTTAGGATAGG | start | 398 |
| | (SEQ ID NO: 51) | (SEQ ID NO: 410) | | |
| | | CTTAAAAACACTAAAACTTCTCAAA | stop | |
| | | (SEQ ID NO: 411) | | |
| 53 | TMEFF2 | TTGTTTGGGTTAATAAATGGA | start | 295 |
| | (SEQ ID NO: 52) | (SEQ ID NO: 412) | | |
| | | CTTCTCTCTTCTCCCCTCTC | stop | |
| | | (SEQ ID NO: 413) | | |
| 54 | TMEFF2 | TGTTGGTTGTTGTTGTTGTT | start | 319 |
| | (SEQ ID NO: 52) | (SEQ ID NO: 414) | | |
| | | CTTTCTACCCATCCCAAAA | stop | |
| | | (SEQ ID NO: 415) | | |
| 55 | PLAU | TATTATAGGAGGATTGAGGAGG | start | 499 |
| | (SEQ ID NO: 53) | (SEQ ID NO: 416) | | |
| | | CCCATAAAATCATACCACTTCT | stop | |
| | | (SEQ ID NO: 417) | | |
| 56 | DNMT1 | TCCCCATCACACCTAAAA | start | 210 |
| | (SEQ ID NO: 54) | (SEQ ID NO: 418) | | |
| | | GGGAGGAGGGGATGTATT | stop | |
| | | (SEQ ID NO: 419) | | |
| 57 | ESR1 | AGGGGGAATTAAATAGAAAGAG | start | 662 |
| | (SEQ ID NO: 55) | (SEQ ID NO: 420) | | |
| | | CAATAAAACCATCCCAAATACT | stop | |
| | | (SEQ ID NO: 421) | | |
| 58 | APAF1 | AGATATGTTTGGAGATTTTAGGA | start | 674 |
| | (SEQ ID NO: 56) | (SEQ ID NO: 422) | | |
| | | AACTCCCCACCTCTAATTCTAT | stop | |
| | | (SEQ ID NO: 423) | | |
| 59 | HOXA5 | AAACCCCAAACAACCTCTAT | start | 392 |
| | (SEQ ID NO: 57) | (SEQ ID NO: 425) | | |
| | | GAAGGGGGAAAGTTATTTAGTTA | stop | |
| | | (SEQ ID NO: 424) | | |
| 60 | RASSF1 | ACCTCTCTACAAATTACAAATTCA | start | 347 |
| | (SEQ ID NO: 58) | (SEQ ID NO: 426) | | |
| | | AGTTTGGGTTAGTTTGGGTT | stop | |
| | | (SEQ ID NO: 427) | | |

[0096] TABLE 2
Hybridisation oligonucleotides

| | | |
|---|---|---|
| No: | Gene | Oligo: |

| | | |
|---|---|---|
| 1 | MDR1 | TTGGTGGTCGTTTTAAGG |
| | (SEQ ID NO: 1) | (SEQ ID NO: 428) |
| 2 | MDR1 | TTGGTGGTTGTTTTAAGG |
| | (SEQ ID NO: 1) | (SEQ ID NO: 429) |
| 3 | MDR1 | TTGAAAGACGTGTTTATA |
| | (SEQ ID NO: 1) | (SEQ ID NO: 430) |
| 4 | MDR1 | TTGAAAGATGTGTTTATA |
| | (SEQ ID NO: 1) | (SEQ ID NO: 431) |
| 5 | MFR1 | AGGTGTAACGGAAGTTAG |
| | (SEQ ID NO: 1) | (SEQ ID NO: 432) |
| 6 | MFR1 | AGGTGTAATGGAAGTTAG |
| | (SEQ ID NO: 1) | (SEQ ID NO: 433) |
| 7 | MFR1 | TAGTTTTTCGAGGAATTA |
| | (SEQ ID NO: 1) | (SEQ ID NO: 434) |
| 8 | MDR1 | TAGTTTTTTGAGGAATTA |
| | (SEQ ID NO: 1) | (SEQ ID NO: 435) |
| 9 | APOC2 | TTTTAAGGCGTGTTAGTT |
| | (SEQ ID NO: 2) | (SEQ ID NO: 436) |
| 10 | APOC2 | TTTTAAGGTGTGTTAGTT |
| | (SEQ ID NO: 2) | (SEQ ID NO: 437) |
| 11 | APOC2 | TTTTGTGACGTGATTTTG |
| | (SEQ ID NO: 2) | (SEQ ID NO: 438) |
| 12 | APOC2 | TTTTGTGATGTGATTTTG |
| | (SEQ ID NO: 2) | (SEQ ID NO: 439) |
| 13 | APOC2 | TTGGGGGACGTTATTGTT |
| | (SEQ ID NO: 2) | (SEQ ID NO: 440) |
| 14 | APOC2 | TTGGGGGATGTTATTGTT |
| | (SEQ ID NO: 2) | (SEQ ID NO: 441) |
| 15 | APOC2 | TGGGTTTGCGGAGAATGG |
| | (SEQ ID NO: 2) | (SEQ ID NO: 442) |
| 16 | APOC2 | TGGGTTTGTGGAGAATGG |
| | (SEQ ID NO: 2) | (SEQ ID NO: 443) |
| 17 | CACNA1G | GTTTAGCGCGATTTGTTT |
| | (SEQ ID NO: 3) | (SEQ ID NO: 444) |
| 18 | CACNA1G | GTTTAGTGTGATTTGTTT |
| | (SEQ ID NO: 3) | (SEQ ID NO: 445) |
| 19 | CACNA1G | TTTAGGAGCGTTAATGTG |
| | (SEQ ID NO: 3) | (SEQ ID NO: 446) |
| 20 | CACNA1G | TTTAGGAGTGTTAATGTG |
| | (SEQ ID NO: 3) | (SEQ ID NO: 447) |
| 21 | CACNA1G | TAGGGTTACGAGGTTAGG |
| | (SEQ ID NO: 3) | (SEQ ID NO: 448) |
| 22 | CACNA1G | TAGGGTTATGAGGTTAGG |
| | (SEQ ID NO: 3) | (SEQ ID NO: 449) |
| 23 | CACNA1G | TTTAGGTTCGTTTAGAGT |
| | (SEQ ID NO: 3) | (SEQ ID NO: 450) |
| 24 | CACNA1G | TTTAGGTTTGTTTAGAGT |
| | (SEQ ID NO: 3) | (SEQ ID NO: 451) |
| 25 | CACNA1G | TTAGGGGTCGTGGATAAA |
| | (SEQ ID NO: 3) | (SEQ ID NO: 452) |
| 26 | CACNA1G | TTAGGGGTTGTGGATAAA |
| | (SEQ ID NO: 3) | (SEQ ID NO: 453) |
| 27 | EGR4 | GGTGGGAAGCGTATTTAT |
| | (SEQ ID NO: 4) | (SEQ ID NO: 454) |
| 28 | EGR4 | GGTGGGAAGTGTATTTAT |
| | (SEQ ID NO: 4) | (SEQ ID NO: 455) |
| 29 | EGR4 | AATAATAACGTTATAGTT |
| | (SEQ ID NO: 4) | (SEQ ID NO: 456) |
| 30 | EGR4 | AATAATAATGTTATAGTT |
| | (SEQ ID NO: 4) | (SEQ ID NO: 457) |
| 31 | EGR4 | TTATAGTTCGAGTTTTTT |
| | (SEQ ID NO: 4) | (SEQ ID NO: 458) |
| 32 | EGR4 | TTATAGTTTGAGTTTTTT |
| | (SEQ ID NO: 4) | (SEQ ID NO: 459) |
| 33 | EGR4 | GGAGTTTTCGGTATATAT |
| | (SEQ ID NO: 4) | (SEQ ID NO: 460) |
| 34 | EGR4 | GGAGTTTTTGGTATATAT |
| | (SEQ ID NO: 4) | (SEQ ID NO: 461) |
| 35 | AR | TGTTATTTCGAGAGAGGT |
| | (SEQ ID NO: 5) | (SEQ ID NO: 462) |
| 36 | AR | TGTTATTTTGAGAGAGGT |
| | (SEQ ID NO: 5) | (SEQ ID NO: 463) |
| 37 | AR | AGAGGTTGCGTTTTAGAG |
| | (SEQ ID NO: 5) | (SEQ ID NO: 464) |
| 38 | AR | AGAGGTTGTGTTTTAGAG |
| | (SEQ ID NO: 5) | (SEQ ID NO: 465) |
| 39 | AR | GTAGTATTCGAAGGTAGT |
| | (SEQ ID NO: 5) | (SEQ ID NO: 466) |
| 40 | AR | GTAGTATTTGAAGGTAGT |
| | (SEQ ID NO: 5) | (SEQ ID NO: 467) |
| 41 | AR | GGAGGTTTCGGGGGTTTT |
| | (SEQ ID NO: 5) | (SEQ ID NO: 468) |
| 42 | AR | GGAGGTTTTGGGGGTTTT |
| | (SEQ ID NO: 5) | (SEQ ID NO: 469) |
| 43 | RB1 | TTAGATTTCGGGATAGGG |
| | (SEQ ID NO: 6) | (SEQ ID NO: 470) |
| 44 | RB1 | TTAGATTTTGGGATAGGG |
| | (SEQ ID NO: 6) | (SEQ ID NO: 471) |
| 45 | RB1 | TATAGTTTCGTTAAGTGT |
| | (SEQ ID NO: 6) | (SEQ ID NO: 472) |
| 46 | RB1 | TATAGTTTTGTTAAGTGT |
| | (SEQ ID NO: 6) | (SEQ ID NO: 473) |
| 47 | RB1 | GTGTATTTCGGTTTGGAG |
| | (SEQ ID NO: 6) | (SEQ ID NO: 474) |
| 48 | RB1 | GTGTATTTTGGTTTGGAG |
| | (SEQ ID NO: 6) | (SEQ ID NO: 475) |
| 49 | RB1 | TTGGAAGGCGTTTGGATT |
| | (SEQ ID NO: 6) | (SEQ ID NO: 476) |
| 50 | RB1 | TTGGAAGGTGTTTGGATT |
| | (SEQ ID NO: 6) | (SEQ ID NO: 477) |
| 51 | GPIb beta | TTTGAGAGCGGGTGGGAG |
| | (SEQ ID NO: 7) | (SEQ ID NO: 898) |
| 52 | GPIb beta | TTTGAGAGTGGGTGGGAG |
| | (SEQ ID NO: 7) | (SEQ ID NO: 899) |
| 53 | GPIb beta | GTGGGAGCGGAAGTTTGA |
| | (SEQ ID NO: 7) | (SEQ ID NO: 904) |
| 54 | GPIb beta | GTGGGAGTGGAAGTTTGA |
| | (SEQ ID NO: 7) | (SEQ ID NO: 905) |
| 55 | GPIb beta | GGTTAGGTCGTAGTATTG |
| | (SEQ ID NO: 7) | (SEQ ID NO: 478) |
| 56 | GPIb beta | GGTTAGGTTGTAGTATTG |
| | (SEQ ID NO: 7) | (SEQ ID NO: 479) |
| 57 | GPIb beta | ATGGGTTTCGGTGAGTTT |
| | (SEQ ID NO: 7) | (SEQ ID NO: 480) |
| 58 | GPIb beta | ATGGGTTTTGGTGAGTTT |
| | (SEQ ID NO: 7) | (SEQ ID NO: 481) |
| 59 | MYOD1 | ATAGTAGTCGGGTGTTGG |
| | (SEQ ID NO: 8) | (SEQ ID NO: 482) |
| 60 | MYOD1 | ATAGTAGTTGGGTGTTGG |
| | (SEQ ID NO: 8) | (SEQ ID NO: 483) |
| 61 | MYOD1 | GTGTTAGTCGTTTAGGGT |
| | (SEQ ID NO: 8) | (SEQ ID NO: 484) |
| 62 | MYOD1 | GTGTTAGTTGTTTAGGGT |
| | (SEQ ID NO: 8) | (SEQ ID NO: 486) |
| 63 | MYOD1 | TAGTTGTTTGTTTGGGTT |
| | (SEQ ID NO: 8) | (SEQ ID NO: 487) |
| 64 | MYOD1 | TAGTTGTTTGTTTGGGTT |
| | (SEQ ID NO: 8) | (SEQ ID NO: 487) |
| 65 | MYOD1 | GGTTATTACGGATAAATA |
| | (SEQ ID NO: 8) | (SEQ ID NO: 488) |
| 66 | MYOD1 | GGTTATTATGGATAAATA |
| | (SEQ ID NO: 8) | (SEQ ID NO: 489) |
| 67 | WT1 | ATTTTGTTCGGATTTATT |
| | (SEQ ID NO: 9) | (SEQ ID NO: 490) |
| 68 | WT1 | ATTTTGTTTGGATTTATT |
| | (SEQ ID NO: 9) | (SEQ ID NO: 491) |
| 69 | WT1 | TATTTGAACGGATTTTTT |
| | (SEQ ID NO: 9) | (SEQ ID NO: 492) |
| 70 | WT1 | TATTTGAATGGATTTTTT |
| | (SEQ ID NO: 9) | (SEQ ID NO: 493) |
| 71 | WT1 | TGTTATATCGGTTAGTTG |
| | (SEQ ID NO: 9) | (SEQ ID NO: 494) |
| 72 | WT1 | TGTTATATTGGTTAGTTG |
| | (SEQ ID NO: 9) | (SEQ ID NO: 495) |
| 73 | WT1 | TGTTTGGTCGGGTTTGGG |
| | (SEQ ID NO: 9) | (SEQ ID NO: 496) |
| 74 | WT1 | TGTTTGGTTGGGTTTGGG |
| | (SEQ ID NO: 9) | (SEQ ID NO: 497) |
| 75 | HLA-F | TATTTGGGCGGGTGAGTG |
| | (SEQ ID NO: 10) | (SEQ ID NO: 894) |
| 76 | HLA-F | TATTTGGGTGGGTGAGTG |
| | (SEQ ID NO: 10) | (SEQ ID NO: 895) |
| 77 | HLA-F | AAAATTTTCGCGGGTTGG |
| | (SEQ ID NO: 10) | (SEQ ID NO: 498) |
| 78 | HLA-F | AAAATTTTTGTGGGTTGG |
| | (SEQ ID NO: 10) | (SEQ ID NO: 499) |
| 79 | HLA-F | GAGAGAAACGGTTTTTGT |
| | (SEQ ID NO: 10) | (SEQ ID NO: 500) |
| 80 | HLA-F | GAGAGAAATGGTTTTTGT |
| | (SEQ ID NO: 10) | (SEQ ID NO: 501) |
| 81 | HLA-F | GAGTTGTTTCGTAGATAT |
| | (SEQ ID NO: 10) | (SEQ ID NO: 502) |
| 82 | HLA-F | GAGTTGTTTTGTAGATAT |
| | (SEQ ID NO: 10) | (SEQ ID NO: 503) |
| 83 | ELK1 | TTTGTTTTCGTTGAGTAG |
| | (SEQ ID NO: 11) | (SEQ ID NO: 504) |
| 84 | ELK1 | TTTGTTTTTGTTGAGTAG |
| | (SEQ ID NO: 11) | (SEQ ID NO: 505) |
| 85 | ELK1 | TTTATTTTCGTTTTTGGG |
| | (SEQ ID NO: 11) | (SEQ ID NO: 506) |
| 86 | ELK1 | TTTATTTTTGTTTTTGGG |
| | (SEQ ID NO: 11) | (SEQ ID NO: 507) |
| 87 | ELK1 | GAAGGGTTCGTTTTTTAA |
| | (SEQ ID NO: 11) | (SEQ ID NO: 508) |
| 88 | ELK1 | GAAGGGTTTGTTTTTTAA |
| | (SEQ ID NO: 11) | (SEQ ID NO: 509) |
| 89 | ELK1 | ATTAATAGCGTTTTGGTT |
| | (SEQ ID NO: 11) | (SEQ ID NO: 510) |
| 90 | ELK1 | ATTAATAGTGTTTTGGTT |
| | (SEQ ID NO: 11) | (SEQ ID NO: 511) |
| 91 | APC | TATTAGAGCGTTTTAAAG |
| | (SEQ ID NO: 12) | (SEQ ID NO: 512) |
| 92 | APC | TATTAGAGTGTTTTAAAG |
| | (SEQ ID NO: 12) | (SEQ ID NO: 513) |
| 93 | APC | GTTTTTTTCGATTTGGGT |
| | (SEQ ID NO: 12) | (SEQ ID NO: 514) |
| 94 | APC | GTTTTTTTTGATTTGGGT |
| | (SEQ ID NO: 12) | (SEQ ID NO: 515) |
| 95 | ARHI | TTGGTTGTCGCGGTAGTT |
| | (SEQ ID NO: 13) | (SEQ ID NO: 516) |
| 96 | ARHI | TTGGTTGTTGTGGTAGTT |
| | (SEQ ID NO: 13) | (SEQ ID NO: 517) |
| 97 | ARHI | TGTTGTTGCGTAGTAGAA |
| | (SEQ ID NO: 13) | (SEQ ID NO: 518) |
| 98 | ARHI | TGTTGTTGTGTAGTAGAA |
| | (SEQ ID NO: 13) | (SEQ ID NO: 519) |
| 99 | ARHI | GAATTATTCGTAGTTTTG |
| | (SEQ ID NO: 13) | (SEQ ID NO: 520) |
| 100 | ARHI | GAATTATTTGTAGTTTTG |
| | (SEQ ID NO: 13) | (SEQ ID NO: 521) |
| 101 | ARHI | TAGAAGAACGAGGTTTGA |
| | (SEQ ID NO: 13) | (SEQ ID NO: 522) |
| 102 | ARHI | TAGAAGAATGAGGTTTGA |
| | (SEQ ID NO: 13) | (SEQ ID NO: 523) |
| 103 | ARHI | TAAGTGTGCGAGTTTAAA |
| | (SEQ ID NO: 13) | (SEQ ID NO: 524) |
| 104 | ARHI | TAAGTGTGTGAGTTTAAA |
| | (SEQ ID NO: 13) | (SEQ ID NO: 525) |
| 105 | BCL2 | AGTGTTTCGCGTGATTGA |
| | (SEQ ID NO: 14) | (SEQ ID NO: 526) |
| 106 | BCL2 | AGTGTTTTGTGTGATTGA |
| | (SEQ ID NO: 14) | (SEQ ID NO: 527) |
| 107 | BCL2 | AGTTGGGGCGAGAGGTGT |
| | (SEQ ID NO: 14) | (SEQ ID NO: 528) |
| 108 | BCL2 | AGTTGGGGTGAGAGGTGT |
| | (SEQ ID NO: 14) | (SEQ ID NO: 529) |
| 109 | BCL2 | TAAGTTGTCGTAGAGGGG |
| | (SEQ ID NO: 14) | (SEQ ID NO: 530) |
| 110 | BCL2 | TAAGTTGTTGTAGAGGGG |
| | (SEQ ID NO: 14) | (SEQ ID NO: 531) |
| 111 | BCL2 | AGGGGTTACGAGTGGGAT |
| | (SEQ ID NO: 14) | (SEQ ID NO: 532) |
| 112 | BCL2 | AGGGGTTATGAGTGGGAT |
| | (SEQ ID NO: 14) | (SEQ ID NO: 533) |
| 113 | BCL2 | AGGATTTCGTCGTTGTAG |
| | (SEQ ID NO: 14) | (SEQ ID NO: 534) |
| 114 | BCL2 | AGGATTTTGTTGTTGTAG |
| | (SEQ ID NO: 14) | (SEQ ID NO: 535) |
| 115 | BRCA1 | TGGATTTTCGTGAGAATT |
| | (SEQ ID NO: 15) | (SEQ ID NO: 536) |
| 116 | BRCA1 | TGGATTTTTGTGAGAATT |
| | (SEQ ID NO: 15) | (SEQ ID NO: 537) |
| 117 | BRCA1 | ATTGTGTTCGTTTTGGTA |
| | (SEQ ID NO: 15) | (SEQ ID NO: 538) |
| 118 | BRCA1 | ATTGTGTTTGTTTTGGTA |
| | (SEQ ID NO: 15) | (SEQ ID NO: 539) |
| 119 | BRCA1 | TATTGTGGCGAAGATTTT |
| | (SEQ ID NO: 15) | (SEQ ID NO: 540) |
| 120 | BRCA1 | TATTGTGGTGAAGATTTT |
| | (SEQ ID NO: 15) | (SEQ ID NO: 541) |
| 121 | BRCA1 | TAATAAGTCGTAATTGGA |
| | (SEQ ID NO: 15) | (SEQ ID NO: 542) |
| 122 | BRCA1 | TAATAAGTTGTAATTGGA |
| | (SEQ ID NO: 15) | (SEQ ID NO: 543) |
| 123 | CALCA | GAGGGTGACGTAATTTAG |
| | (SEQ ID NO: 16) | (SEQ ID NO: 544) |
| 124 | CALCA | GAGGGTGATGTAATTTAG |
| | (SEQ ID NO: 16) | (SEQ ID NO: 545) |
| 125 | CALCA | TGTATTGGCGGAATTTTT |
| | (SEQ ID NO: 16) | (SEQ ID NO: 546) |
| 126 | CALCA | TGTATTGGTGGAATTTTT |
| | (SEQ ID NO: 16) | (SEQ ID NO: 547) |
| 127 | CALCA | ATTTATAGCGGCGGGAAT |
| | (SEQ ID NO: 16) | (SEQ ID NO: 548) |
| 128 | CALCA | ATTTATAGTGGTGGGAAT |
| | (SEQ ID NO: 16) | (SEQ ID NO: 549) |
| 129 | CALCA | TGTTAGTTCGCGATTTAT |
| | (SEQ ID NO: 16) | (SEQ ID NO: 550) |
| 130 | CALCA | TGTTAGTTTGTGATTTAT |
| | (SEQ ID NO: 16) | (SEQ ID NO: 551) |
| 131 | CALCA | GGTTGGATCGGATAGTTT |
| | (SEQ ID NO: 16) | (SEQ ID NO: 552) |
| 132 | CALCA | GGTTGGATTGGATAGTTT |
| | (SEQ ID NO: 16) | (SEQ ID NO: 553) |
| 133 | CCND2 | TTTAATAACGAGAGGGGA |
| | (SEQ ID NO: 17) | (SEQ ID NO: 554) |
| 134 | CCND2 | TTTAATAATGAGAGGGGA |
| | (SEQ ID NO: 17) | (SEQ ID NO: 555) |
| 135 | CCND2 | TTAGTTTGCGTTATCGTT |
| | (SEQ ID NO: 17) | (SEQ ID NO: 556) |
| 136 | CCND2 | TTAGTTTGTGTTATTGTT |
| | (SEQ ID NO: 17) | (SEQ ID NO: 557) |
| 137 | CCND2 | TTTTAGAGCGGAGAAGAG |
| | (SEQ ID NO: 17) | (SEQ ID NO: 558) |
| 138 | CCND2 | TTTTAGAGTGGAGAAGAG |
| | (SEQ ID NO: 17) | (SEQ ID NO: 559) |
| 139 | CCND2 | GGTAGTTTCGAGGTTTTG |
| | (SEQ ID NO: 17) | (SEQ ID NO: 560) |
| 140 | CCND2 | GGTAGTTTTGAGGTTTTG |
| | (SEQ ID NO: 17) | (SEQ ID NO: 561) |
| 141 | CDH1 | AGGGGGTGCGTGGTTGTA |
| | (SEQ ID NO: 18) | (SEQ ID NO: 562) |
| 142 | CDH1 | AGGGGGTGTGTGGTTGTA |
| | (SEQ ID NO: 18) | (SEQ ID NO: 563) |
| 143 | CDH1 | AGTTTCGACGTTATTGAG |
| | (SEQ ID NO: 18) | (SEQ ID NO: 564) |
| 144 | CDH1 | AGTTTTGATGTTATTGAG |
| | (SEQ ID NO: 18) | (SEQ ID NO: 565) |
| 145 | CDH1 | AGAGGTTGCGGTTTTAAG |
| | (SEQ ID NO: 18) | (SEQ ID NO: 56) |
| 146 | CDH1 | AGAGGTTGTGGTTTTAAG |
| | (SEQ ID NO: 18) | (SEQ ID NO: 567) |
| 147 | CDH1 | AGGGGATTCGGGGTATTT |
| | (SEQ ID NO: 18) | (SEQ ID NO: 568) |
| 148 | CDH1 | AGGGGATTTGGGGTATTT |
| | (SEQ ID NO: 18) | (SEQ ID NO: 569) |
| 149 | CDKN1B | AAGAGAAACGTTGGAATA |
| | (SEQ ID NO: 19) | (SEQ ID NO: 570) |
| 150 | CDKN1B | AAGAGAAATGTTGGAATA |
| | (SEQ ID NO: 19) | (SEQ ID NO: 571) |
| 151 | CDKN1B | TTTGATTTCGAGGGGAGT |
| | (SEQ ID NO: 19) | (SEQ ID NO: 914) |
| 152 | CDKN1B | TTTGATTTTGAGGGGAGT |
| | (SEQ ID NO: 19) | (SEQ ID NO: 915) |
| 153 | CDKN1B | GTATTTGGCGGTTGGATT |
| | (SEQ ID NO: 19) | (SEQ ID NO: 572) |
| 154 | CDKN1B | GTATTTGGTGGTTGGATT |
| | (SEQ ID NO: 19) | (SEQ ID NO: 573) |
| 155 | CDKN1B | TATAATTTCGGGAAAGAA |
| | (SEQ ID NO: 19) | (SEQ ID NO: 574) |
| 156 | CDKN1B | TATAATTTTGGGAAAGAA |
| | (SEQ ID NO: 19) | (SEQ ID NO: 575) |
| 157 | CDKN2a | AGAGTGAACGTATTTAAA |
| | (SEQ ID NO: 20) | (SEQ ID NO: 576) |
| 158 | CDKN2a | AGAGTGAATGTATTTAAA |
| | (SEQ ID NO: 20) | (SEQ ID NO: 577) |
| 159 | CDKN2a | GTTATATTCGTTAAGTGT |
| | (SEQ ID NO: 20) | (SEQ ID NO: 578) |
| 160 | CDKN2a | GTTATATTTGTTAAGTGT |
| | (SEQ ID NO: 20) | (SEQ ID NO: 579) |
| 161 | CDKN2a | TAAGTGTTCGGAGTTAAT |
| | (SEQ ID NO: 20) | (SEQ ID NO: 580) |
| 162 | CDKN2a | TAAGTGTTTGGAGTTAAT |
| | (SEQ ID NO: 20) | (SEQ ID NO: 581) |
| 163 | CDKN2a | GTTAGTATCGGAGGAAGA |
| | (SEQ ID NO: 20) | (SEQ ID NO: 582) |
| 164 | CDKN2a | GTTAGTATTGGAGGAAGA |
| | (SEQ ID NO: 20) | (SEQ ID NO: 583) |
| 165 | CDKN2a | GGAGTTTTCGGTTGATTG |
| | (SEQ ID NO: 20) | (SEQ ID NO: 896) |
| 166 | CDKN2a | GGAGTTTTTGGTTGATTG |
| | (SEQ ID NO: 20) | (SEQ ID NO: 897) |
| 167 | CDKN2a | TTGTTTAACGTATCGAAT |
| | (SEQ ID NO: 20) | (SEQ ID NO: 584) |
| 168 | CDKN2a | TTGTTTAATGTATTGAAT |
| | (SEQ ID NO: 20) | (SEQ ID NO: 585) |
| 169 | CDKN2a | AATAGTTACGGTCGGAGG |
| | (SEQ ID NO: 20) | (SEQ ID NO: 586) |
| 170 | CDKN2a | AATAGTTATGGTTGGAGG |
| | (SEQ ID NO: 20) | (SEQ ID NO: 587) |
| 171 | CDKN2B | ATATTTAGCGAGTAGTGT |
| | (SEQ ID NO: 21) | (SEQ ID NO: 588) |
| 172 | CDKN2B | ATATTTAGTGAGTAGTGT |
| | (SEQ ID NO: 21) | (SEQ ID NO: 589) |
| 173 | CDKN2B | TGGGGAGACGTCGGTTTT |
| | (SEQ ID NO: 21) | (SEQ ID NO: 590) |
| 174 | CDKN2B | TGGGGAGATGTTGGTTTT |
| | (SEQ ID NO: 21) | (SEQ ID NO: 591) |
| 175 | CDKN2B | TTATTGTACGGGGTTTTA |
| | (SEQ ID NO: 21) | (SEQ ID NO: 592) |
| 176 | CDKN2B | TTATTGTATGGGGTTTTA |
| | (SEQ ID NO: 21) | (SEQ ID NO: 593) |
| 177 | CDKN2B | TAGAAGGACGACGGGAGG |
| | (SEQ ID NO: 21) | (SEQ ID NO: 594) |
| 178 | CDKN2B | TAGAAGGATGATGGGAGG |
| | (SEQ ID NO: 21) | (SEQ ID NO: 595) |
| 179 | CDKN2B | AGAGAGTGCGTCGGAGTA |
| | (SEQ ID NO: 21) | (SEQ ID NO: 596) |
| 180 | CDKN2B | AGAGAGTGTGTTGGAGTA |
| | (SEQ ID NO: 21) | (SEQ ID NO: 597) |
| 181 | CD44 | GTGGGGTTCGGAGGTATA |
| | (SEQ ID NO: 22) | (SEQ ID NO: 598) |
| 182 | CD44 | GTGGGGTTTGGAGGTATA |
| | (SEQ ID NO: 22) | (SEQ ID NO: 599) |
| 183 | CD44 | AGGTATTTCGCGATATTT |
| | (SEQ ID NO: 22) | (SEQ ID NO: 600) |
| 184 | CD44 | AGGTATTTTGTGATAGTTT |
| | (SEQ ID NO: 22) | (SEQ ID NO: 601) |
| 185 | CD44 | TTGTTTAGCGGATTTTAG |
| | (SEQ ID NO: 22) | (SEQ ID NO: 602) |
| 186 | CD44 | TTGTTTAGTGGATTTTAG |
| | (SEQ ID NO: 22) | (SEQ ID NO: 603) |
| 187 | CD44 | TGGTGGTACGTAGTTTGG |
| | (SEQ ID NO: 22) | (SEQ ID NO: 604) |
| 188 | CD44 | TGGTGGTATGTAGTTTGG |
| | (SEQ ID NO: 22) | (SEQ ID NO: 605) |
| 189 | CD44 | TGAGTGTTCGTCGTAGTT |
| | (SEQ ID NO: 22) | (SEQ ID NO: 606) |
| 190 | CD44 | TGAGTGTTTGTCGTAGTT |
| | (SEQ ID NO: 22) | (SEQ ID NO: 607) |
| 191 | CSPG2 | AAGATTTTCGGTTAGTTT |
| | (SEQ ID NO: 23) | (SEQ ID NO: 608) |
| 192 | CSPG2 | AAGATTTTTGGTTAGTTT |
| | (SEQ ID NO: 23) | (SEQ ID NO: 609) |
| 193 | CSPG2 | ATGTGATTCGTTTGGGTA |
| | (SEQ ID NO: 23) | (SEQ ID NO: 610) |
| 194 | CSPG2 | ATGTGATTTGTTTGGGTA |
| | (SEQ ID NO: 23) | (SEQ ID NO: 611) |
| 195 | CSPG2 | GGGTAACGTCGAATTTAG |
| | (SEQ ID NO: 23) | (SEQ ID NO: 612) |
| 196 | CSPG2 | GGGTAATGTTGAATTTAG |
| | (SEQ ID NO: 23) | (SEQ ID NO: 613) |
| 197 | CSPG2 | AAAAATTCGCGAGTTTAG |
| | (SEQ ID NO: 23) | (SEQ ID NO: 614) |
| 198 | CSPG2 | AAAAATTTGTGAGTTTAG |
| | (SEQ ID NO: 23) | (SEQ ID NO: 615) |
| 199 | DAPK1 | GTTGGAGTCGAGGTTTGA |
| | (SEQ ID NO: 24) | (SEQ ID NO: 616) |
| 200 | DAPK1 | GTTGGAGTTGAGGTTTGA |
| | (SEQ ID NO: 24) | (SEQ ID NO: 617) |
| 201 | DAPK1 | TTTTTTGTCGGATTGGTG |
| | (SEQ ID NO: 24) | (SEQ ID NO: 618) |
| 202 | DAPK1 | TTTTTTGTTGGATTGGTG |
| | (SEQ ID NO: 24) | (SEQ ID NO: 619) |
| 203 | DAPK1 | GAAGGGAGCGTATTTTAT |
| | (SEQ ID NO: 24) | (SEQ ID NO: 620) |
| 204 | DAPK1 | GAAGGGAGTGTATTTTAT |
| | (SEQ ID NO: 24) | (SEQ ID NO: 621) |
| 205 | DAPK1 | TTGTTTTTCGGAAATTTG |
| | (SEQ ID NO: 24) | (SEQ ID NO: 622) |
| 206 | DAPK1 | TTGTTTTTTGGAAATTTG |
| | (SEQ ID NO: 24) | (SEQ ID NO: 623) |
| 207 | GGT1 | ATAGGTGGCGTTTGGATT |
| | (SEQ ID NO: 25) | (SEQ ID NO: 624) |
| 208 | GGT1 | ATAGGTGGTGTTTGGATT |
| | (SEQ ID NO: 25) | (SEQ ID NO: 625) |
| 209 | GGT1 | GGGTGGTGCGTTGTTGTA |
| | (SEQ ID NO: 25) | (SEQ ID NO: 626) |
| 210 | GGT1 | GGGTGGTGTGTTGTTGTA |
| | (SEQ ID NO: 25) | (SEQ ID NO: 627) |
| 211 | GGT1 | TATATTATCGGTTTTAGG |
| | (SEQ ID NO: 25) | (SEQ ID NO: 628) |
| 212 | GGT1 | TATATTATTGGTTTTAGG |
| | (SEQ ID NO: 25) | (SEQ ID NO: 629) |
| 213 | GGT1 | AGGTTAGACGTTTTGTAT |
| | (SEQ ID NO: 25) | (SEQ ID NO: 630) |
| 214 | GGT1 | AGGTTAGATGTTTTGTAT |
| | (SEQ ID NO: 25) | (SEQ ID NO: 631) |
| 215 | GSTP1 | GGTTTTTTCGGTTAGTTG |
| | (SEQ ID NO: 26) | (SEQ ID NO: 632) |
| 216 | GSTP1 | GGTTTTTTTGGTTAGTTG |
| | (SEQ ID NO: 26) | (SEQ ID NO: 633) |
| 217 | GSTP1 | TTTTAGGGGCGTTTTTTG |
| | (SEQ ID NO: 26) | (SEQ ID NO: 634) |
| 218 | GSTP1 | TTTTAGGGTGTTTTTTTG |
| | (SEQ ID NO: 26) | (SEQ ID NO: 635) |
| 219 | GSTP1 | GTAGTTTTCGTTATTAGT |
| | (SEQ ID NO: 26) | (SEQ ID NO: 636) |
| 220 | GSTP1 | GTAGTTTTTGTTATTAGT |
| | (SEQ ID NO: 26) | (SEQ ID NO: 637) |
| 221 | HIC-1 | ATGATTCGTCGTGGGTTT |
| | (SEQ ID NO: 27) | (SEQ ID NO: 638) |
| 222 | HIC-1 | ATGATTTGTTGTGGGTTT |
| | (SEQ ID NO: 27) | (SEQ ID NO: 639) |
| 223 | HIC-1 | AGGAGATTCGAAAGTTTA |
| | (SEQ ID NO: 27) | (SEQ ID NO: 640) |
| 224 | HIC-1 | AGGAGATTTGAAAGTTTA |
| | (SEQ ID NO: 27) | (SEQ ID NO: 641) |
| 225 | HIC-1 | GGGTTTTACGTGGTTGTT |
| | (SEQ ID NO: 27) | (SEQ ID NO: 642) |
| 226 | HIC-1 | GGGTTTTATGTGGTTGTT |
| | (SEQ ID NO: 27) | (SEQ ID NO: 643) |
| 227 | HIC-1 | TTTTAGAGCGTTAGGGTT |
| | (SEQ ID NO: 27) | (SEQ ID NO: 644) |
| 228 | HIC-1 | TTTTAGAGTGTTAGGGTT |
| | (SEQ ID NO: 27) | (SEQ ID NO: 645) |
| 229 | LAP18 | ATTAAAGGCGATTAAATT |
| | (SEQ ID NO: 28) | (SEQ ID NO: 646) |
| 230 | LAP18 | ATTAAAGGTGATTAAATT |
| | (SEQ ID NO: 28) | (SEQ ID NO: 647) |
| 231 | LAP18 | GGTAAGAACGTATATAGT |
| | (SEQ ID NO: 28) | (SEQ ID NO: 648) |
| 232 | LAP18 | GGTAAGAATGTATATAGT |
| | (SEQ ID NO: 28) | (SEQ ID NO: 649) |
| 233 | LAP18 | AGAAATTACGATGATGTT |
| | (SEQ ID NO: 28) | (SEQ ID NO: 650) |
| 234 | LAP18 | AGAAATTATGATGATGTT |
| | (SEQ ID NO: 28) | (SEQ ID NO: 651) |
| 235 | LAP18 | GTGGGTGGCGTATTAGAA |
| | (SEQ ID NO: 28) | (SEQ ID NO: 652) |
| 236 | LAP18 | GTGGGTGGTGTATTAGAA |
| | (SEQ ID NO: 28) | (SEQ ID NO: 653) |
| 237 | LKB1 | GGGTTAAGCGTCGATTAA |
| | (SEQ ID NO: 29) | (SEQ ID NO: 654) |
| 238 | LKB1 | GGGTTAAGTGTTGATTAA |
| | (SEQ ID NO: 29) | (SEQ ID NO: 655) |
| 239 | LKB1 | TAGAGGGTCGGGGATGGT |
| | (SEQ ID NO: 29) | (SEQ ID NO: 656) |
| 240 | LKB1 | TAGAGGGTTGGGGATGGT |
| | (SEQ ID NO: 29) | (SEQ ID NO: 657) |
| 241 | LKB1 | TTTAGGTTCGTAAGTTTA |
| | (SEQ ID NO: 29) | (SEQ ID NO: 658) |
| 242 | LKB1 | TTTAGGTTTGTAAGTTTA |
| | (SEQ ID NO: 29) | (SEQ ID NO: 659) |
| 243 | LKB1 | AGGGAGGTCGTTGGTATT |
| | (SEQ ID NO: 29) | (SEQ ID NO: 912) |
| 244 | LKB1 | AGGGAGGTTGTTGGTATT |
| | (SEQ ID NO: 29) | (SEQ ID NO: 913) |
| 245 | LKB1 | TTAATGAGCGCGTTGTAT |
| | (SEQ ID NO: 29) | (SEQ ID NO: 660) |
| 246 | LKB1 | TTAATGAGTGCGTTGTAT |
| | (SEQ ID NO: 29) | (SEQ ID NO: 661) |
| 247 | LOC51147 | TTTAGTGACGAGAAGGTT |
| | (SEQ ID NO: 30) | (SEQ ID NO: 662) |
| 248 | LOC51147 | TTTAGTGATGAGAAGGTT |
| | (SEQ ID NO: 30) | (SEQ ID NO: 663) |
| 249 | LOC51147 | TTATGAAGCGGTTTTGTG |
| | (SEQ ID NO: 30) | (SEQ ID NO: 664) |
| 250 | LOC51147 | TTATGAAGTGGTTTTGTG |
| | (SEQ ID NO: 30) | (SEQ ID NO: 665) |
| 251 | LOC51147 | GTAGTAGGATCGAGGTTT |
| | (SEQ ID NO: 30) | (SEQ ID NO: 666) |
| 252 | LOC51147 | GTAGTAGGATTGAGGTTT |
| | (SEQ ID NO: 30) | (SEQ ID NO: 667) |
| 253 | LOC51147 | GTTAGAGACGTGTTTTGA |
| | (SEQ ID NO: 30) | (SEQ ID NO: 668) |
| 254 | LOC51147 | GTTAGAGATGTGTTTTGA |
| | (SEQ ID NO: 30) | (SEQ ID NO: 669) |
| 255 | MGMT | TAAGGATACGAGTTATAT |
| | (SEQ ID NO: 31) | (SEQ ID NO: 670) |
| 256 | MGMT | TAAGGATATGAGTTATAT |
| | (SEQ ID NO: 31) | (SEQ ID NO: 671) |
| 257 | MGMT | TTGGAGAGCGGTTGAGTT |
| | (SEQ ID NO: 31) | (SEQ ID NO: 672) |
| 258 | MGMT | TTGGAGAGTGGTTGAGTT |
| | (SEQ ID NO: 31) | (SEQ ID NO: 673) |
| 259 | MGMT | TAGGTTATCGGTGATTGT |
| | (SEQ ID NO: 31) | (SEQ ID NO: 890) |
| 260 | MGMT | TAGGTTATTGGTGATTGT |
| | (SEQ ID NO: 31) | (SEQ ID NO: 891) |
| 261 | MGMT | AGTAGGATCGGGATTTTT |
| | (SEQ ID NO: 31) | (SEQ ID NO: 674) |
| 262 | MGMT | AGTAGGATTGGGATTTTT |
| | (SEQ ID NO: 31) | (SEQ ID NO: 675) |
| 263 | MLH1 | TTGAGAAGCGTTAAGTAT |
| | (SEQ ID NO: 32) | (SEQ ID NO: 676) |
| 264 | MLH1 | TTGAGAAGTGTTAAGTAT |
| | (SEQ ID NO: 32) | (SEQ ID NO: 677) |
| 265 | MLH1 | TTAGGTAGCGGGTAGTAG |
| | (SEQ ID NO: 32) | (SEQ ID NO: 678) |
| 266 | MLH1 | TTAGGTAGTGGGTAGTAG |
| | (SEQ ID NO: 32) | (SEQ ID NO: 679) |
| 267 | MLH1 | GTAGTAGTCGTTTTAGGG |
| | (SEQ ID NO: 32) | (SEQ ID NO: 680) |
| 268 | MLH1 | GTAGTAGTTGTTTTAGGG |
| | (SEQ ID NO: 32) | (SEQ ID NO: 681) |
| 269 | MLH1 | ATAGTTGTCGTTGAAGGG |
| | (SEQ ID NO: 32) | (SEQ ID NO: 682) |
| 270 | MLH1 | ATAGTTGTTGTTGAAGGG |
| | (SEQ ID NO: 32) | (SEQ ID NO: 683) |
| 271 | MLH1 | GGGTTATTCGGCGGTTGG |
| | (SEQ ID NO: 32) | (SEQ ID NO: 684) |
| 272 | MLH1 | GGGTTATTTGGTGGTTGG |
| | (SEQ ID NO: 32) | (SEQ ID NO: 685) |
| 273 | MNCA9 | TAAAAGGGCGTTTTGTGA |
| | (SEQ ID NO: 33) | (SEQ ID NO: 686) |
| 274 | MNCA9 | TAAAAGGGTGTTTTGTGA |
| | (SEQ ID NO: 33) | (SEQ ID NO: 687) |
| 275 | MNCA9 | TTAATGTACGTATAGTTC |
| | (SEQ ID NO: 33) | (SEQ ID NO: 688) |
| 276 | MNCA9 | TTAATGTATGTATAGTTC |
| | (SEQ ID NO: 33) | (SEQ ID NO: 689) |
| 277 | MNCA9 | GTATATATCGTGTGTTGG |
| | (SEQ ID NO: 33) | (SEQ ID NO: 690) |
| 278 | MNCA9 | GTATATATTGTGTGTTGG |
| | (SEQ ID NO: 33) | (SEQ ID NO: 691) |
| 279 | MNCA9 | TAGTTAGTCGTATGGTTT |
| | (SEQ ID NO: 33) | (SEQ ID NO: 692) |
| 280 | MNCA9 | TAGTTAGTTGTATGGTTT |
| | (SEQ ID NO: 33) | (SEQ ID NO: 693) |
| 281 | MYC | TTAGAGTGTTCGGTTGTT |
| | (SEQ ID NO: 34) | (SEQ ID NO: 694) |
| 282 | MYC | TTAGAGTGTTTGGTTGTT |
| | (SEQ ID NO: 34) | (SEQ ID NO: 695) |
| 283 | MYC | AGGATTTTCGAGTTGTGT |
| | (SEQ ID NO: 34) | (SEQ ID NO: 696) |
| 284 | MYC | AGGATTTTTGAGTTGTGT |
| | (SEQ ID NO: 34) | (SEQ ID NO: 697) |
| 285 | MYC | GAGGGATCGCGTTGAGTA |
| | (SEQ ID NO: 34) | (SEQ ID NO: 900) |
| 286 | MYC | GAGGGATTGTGTTGAGTA |
| | (SEQ ID NO: 34) | (SEQ ID NO: 901) |
| 287 | MYC | AATTTTAGCGAGAGGTAG |
| | (SEQ ID NO: 34) | (SEQ ID NO: 698) |
| 288 | MYC | AATTTTAGTGAGAGGTAG |
| | (SEQ ID NO: 34) | (SEQ ID NO: 699) |
| 289 | MYC | TTGTGGGCGTTTTGGGAA |
| | (SEQ ID NO: 34) | (SEQ ID NO: 700) |
| 290 | MYC | TTGTGGGTGTTTTGGGAA |
| | (SEQ ID NO: 34) | (SEQ ID NO: 701) |
| 291 | N33 | GTGAATCGGATGTTTTGT |
| | (SEQ ID NO: 35) | (SEQ ID NO: 702) |
| 292 | N33 | GTGAATTGGATGTTTTGT |
| | (SEQ ID NO: 35) | (SEQ ID NO: 703) |
| 293 | N33 | GTTTAGTTAGCGGGTTTT |
| | (SEQ ID NO: 35) | (SEQ ID NO: 704) |
| 294 | N33 | GTTTAGTTAGTGGGTTTT |
| | (SEQ ID NO: 35) | (SEQ ID NO: 705) |
| 295 | N33 | GTTTTGTCGCGATGGGGG |
| | (SEQ ID NO: 35) | (SEQ ID NO: 706) |
| 296 | N33 | GTTTTGTTGTGATGGGGG |
| | (SEQ ID NO: 35) | (SEQ ID NO: 707) |
| 297 | N33 | ATTTAGTTCGGGGGAGGA |
| | (SEQ ID NO: 35) | (SEQ ID NO: 708) |
| 298 | N33 | ATTTAGTTTGGGGGAGGA |
| | (SEQ ID NO: 35) | (SEQ ID NO: 709) |
| 299 | PAX6 | TTTTTGGTCGTAGGGTTG |
| | (SEQ ID NO: 36) | (SEQ ID NO: 710) |
| 300 | PAX6 | TTTTTGGTTGTAGGGTTG |
| | (SEQ ID NO: 36) | (SEQ ID NO: 711) |
| 301 | PAX6 | TATTGTTTCGGTTGTTAG |
| | (SEQ ID NO: 36) | (SEQ ID NO: 902) |
| 302 | PAX6 | TATTGTTTTGGTTGTTAG |
| | (SEQ ID NO: 36) | (SEQ ID NO: 903) |
| 303 | PAX6 | TTTAGGTCGCGTAGATTT |
| | (SEQ ID NO: 36) | (SEQ ID NO: 712) |
| 304 | PAX6 | TTTAGGTTGTGTAGATTT |
| | (SEQ ID NO: 36) | (SEQ ID NO: 713) |
| 305 | PAX6 | AGAGTTTAGCGTATTTTT |
| | (SEQ ID NO: 36) | (SEQ ID NO: 714) |
| 306 | PAX6 | AGAGTTTAGTGTATTTTT |
| | (SEQ ID NO: 36) | (SEQ ID NO: 715) |
| 307 | PGR | AAGGAGTCGCGTGTTATT |
| | (SEQ ID NO: 37) | (SEQ ID NO: 716) |
| 308 | PGR | AAGGAGTTGTGTGTTATT |
| | (SEQ ID NO: 37) | (SEQ ID NO: 717) |
| 309 | PGR | TTAAGTGTCGGATTTGTG |
| | (SEQ ID NO: 37) | (SEQ ID NO: 718) |
| 310 | PGR | TTAAGTGTTGGATTTGTG |
| | (SEQ ID NO: 37) | (SEQ ID NO: 719) |
| 311 | PGR | TTAGTTTTCGGATAGAAG |
| | (SEQ ID NO: 37) | (SEQ ID NO: 720) |
| 312 | PGR | TTAGTTTTTGGATAGAAG |
| | (SEQ ID NO: 37) | (SEQ ID NO: 721) |
| 313 | PGR | GGGATAAACGATAGTTAT |
| | (SEQ ID NO: 37) | (SEQ ID NO: 722) |
| 314 | PGR | GGGATAAATGATAGTTAT |
| | (SEQ ID NO: 37) | (SEQ ID NO: 723) |
| 315 | PTEN | GGATTTTGCGTTCGTATT |
| | (SEQ ID NO: 38) | (SEQ ID NO: 724) |
| 316 | PTEN | GGATTTTGTGTTTGTATT |
| | (SEQ ID NO: 38) | (SEQ ID NO: 725) |
| 317 | PTEN | AGAGTTATCGTTTTGTTT |
| | (SEQ ID NO: 38) | (SEQ ID NO: 726) |
| 318 | PTEN | AGAGTTATTGTTTTGTTT |
| | (SEQ ID NO: 38) | (SEQ ID NO: 727) |
| 319 | PTEN | TGATGTGGCGGGATTTTT |
| | (SEQ ID NO: 38) | (SEQ ID NO: 728) |
| 320 | PTEN | TGATGTGGTGGGATTTTT |
| | (SEQ ID NO: 38) | (SEQ ID NO: 729) |
| 321 | PTEN | TTTTTATGCGTTGCGGTA |
| | (SEQ ID NO: 38) | (SEQ ID NO: 730) |
| 322 | PTEN | TTTTTATGTGTTGTGGTA |
| | (SEQ ID NO: 38) | (SEQ ID NO: 731) |
| 323 | RARB | TAGTAGTTCGGGTAGGGT |
| | (SEQ ID NO: 39) | (SEQ ID NO: 906) |
| 324 | RARB | TAGTAGTTTGGGTAGGGT |
| | (SEQ ID NO: 39) | (SEQ ID NO: 907) |
| 325 | RARB | GGGTTTATCGAAAGTTTA |
| | (SEQ ID NO: 39) | (SEQ ID NO: 732) |
| 326 | RARB | GGGTTTATTGAAAGTTTA |
| | (SEQ ID NO: 39) | (SEQ ID NO: 733) |
| 327 | RARB | TTTTTATGCGAGTTGTTT |
| | (SEQ ID NO: 39) | (SEQ ID NO: 734) |
| 328 | RARB | TTTTTATGTGAGTTGTTT |
| | (SEQ ID NO: 39) | (SEQ ID NO: 735) |
| 329 | RARB | TTGGGTATCGTCGGGGTA |
| | (SEQ ID NO: 39) | (SEQ ID NO: 736) |
| 330 | RARB | TTGGGTATTGTTGGGGTA |
| | (SEQ ID NO: 39) | (SEQ ID NO: 737) |
| 331 | SFN | ATAGAGTTCGGTATTGGT |
| | (SEQ ID NO: 40) | (SEQ ID NO: 738) |
| 332 | SFN | ATAGAGTTTGGTATTGGT |
| | (SEQ ID NO: 40) | (SEQ ID NO: 739) |
| 333 | SFN | GAGTAGGTCGAACGTTAT |
| | (SEQ ID NO: 40) | (SEQ ID NO: 884) |
| 334 | SFN | GAGTAGGTTGAATGTTAT |
| | (SEQ ID NO: 40) | (SEQ ID NO: 885) |
| 335 | SFN | AAAAGTAACGAGGAGGGT |
| | (SEQ ID NO: 40) | (SEQ ID NO: 888) |
| 336 | SFN | AAAAGTAATGAGGAGGGT |
| | (SEQ ID NO: 40) | (SEQ ID NO: 889) |
| 337 | SFN | TTTTAGGGCGTGTGCGAT |
| | (SEQ ID NO: 40) | (SEQ ID NO: 740) |
| 338 | SFN | TTTTAGGGTGTGTGTGAT |
| | (SEQ ID NO: 40) | (SEQ ID NO: 741) |
| 339 | S100A2 | TTTAATTGCGGTTGTGTG |
| | (SEQ ID NO: 41) | (SEQ ID NO: 742) |
| 340 | S100A2 | TTTAATTGTGGTTGTGTG |
| | (SEQ ID NO: 41) | (SEQ ID NO: 743) |
| 341 | S100A2 | TATATAGGCGTATGTATG |
| | (SEQ ID NO: 41) | (SEQ ID NO: 744) |
| 342 | S100A2 | TATATAGGTGTATGTATG |
| | (SEQ ID NO: 41) | (SEQ ID NO: 745) |
| 343 | S100A2 | TATGTATACGAGTATTGG |
| | (SEQ ID NO: 41) | (SEQ ID NO: 746) |
| 344 | S100A2 | TATGTATATGAGTATTGG |
| | (SEQ ID NO: 41) | (SEQ ID NO: 747) |
| 345 | S100A2 | AGTTTTAGCGTGTGTTTA |
| | (SEQ ID NO: 41) | (SEQ ID NO: 748) |
| 346 | S100A2 | AGTTTTAGTGTGTGTTTA |
| | (SEQ ID NO: 41) | (SEQ ID NO: 749) |
| 347 | TFF1 | GATAGAGACGTGTATAGT |
| | (SEQ ID NO: 42) | (SEQ ID NO: 750) |
| 348 | TFF1 | GATAGAGATGTGTATAGT |
| | (SEQ ID NO: 42) | (SEQ ID NO: 751) |
| 349 | TFF1 | TGGTTTTTCGTGAAAGAT |
| | (SEQ ID NO: 42) | (SEQ ID NO: 752) |
| 350 | TFF1 | TGGTTTTTTGTGAAAGAT |
| | (SEQ ID NO: 42) | (SEQ ID NO: 753) |
| 351 | TFF1 | TTGGTTTTCGGTATTTTG |
| | (SEQ ID NO: 42) | (SEQ ID NO: 754) |
| 352 | TFF1 | TTGGTTTTTGGTATTTTG |
| | (SEQ ID NO: 42) | (SEQ ID NO: 755) |
| 353 | TGFBR2 | ATTTGGAGCGAGGAATTT |
| | (SEQ ID NO: 43) | (SEQ ID NO: 756) |
| 354 | TGFBR2 | ATTTGGAGTGAGGAATTT |
| | (SEQ ID NO: 43) | (SEQ ID NO: 757) |
| 355 | TGFBR2 | TTGAAAGTCGGTTAAAGT |
| | (SEQ ID NO: 43) | (SEQ ID NO: 758) |
| 356 | TGFBR2 | TTGAAAGTTGGTTAAAGT |
| | (SEQ ID NO: 43) | (SEQ ID NO: 759) |
| 357 | TGFBR2 | AAAGTTTTCGGAGGGGTT |
| | (SEQ ID NO: 43) | (SEQ ID NO: 760) |
| 358 | TGFBR2 | AAAGTTTTTGGAGGGGTT |
| | (SEQ ID NO: 43) | (SEQ ID NO: 761) |
| 359 | TGFBR2 | GGTAGTTACGAGAGAGTT |
| | (SEQ ID NO: 43) | (SEQ ID NO: 762) |
| 360 | TGFBR2 | GGTAGTTATGAGAGAGTT |
| | (SEQ ID NO: 43) | (SEQ ID NO: 763) |
| 361 | TGFBR2 | GTTGGACGTCGAGGAGAG |
| | (SEQ ID NO: 43) | (SEQ ID NO: 764) |
| 362 | TGFBR2 | GTTGGATGTTGAGGAGAG |
| | (SEQ ID NO: 43) | (SEQ ID NO: 765) |
| 363 | TIMP3 | AGGTTTTTCGTTGGAGAA |
| | (SEQ ID NO: 44) | (SEQ ID NO: 766) |
| 364 | TIMP3 | AGGTTTTTTGTTGGAGAA |
| | (SEQ ID NO: 44) | (SEQ ID NO: 767) |
| 365 | TIMP3 | GAAAATATCGGTATTTTG |
| | (SEQ ID NO: 44) | (SEQ ID NO: 768) |
| 366 | TIMP3 | GAAAATATTGGTATTTTG |
| | (SEQ ID NO: 44) | (SEQ ID NO: 769) |
| 367 | TIMP3 | ATGTGGGGCGCGGGGATA |
| | (SEQ ID NO: 44) | (SEQ ID NO: 770) |
| 368 | TIMP3 | ATGTGGGGTGTGGGGATA |
| | (SEQ ID NO: 44) | (SEQ ID NO: 771) |
| 369 | TIMP3 | GGGATAAGCGAATTTTTT |
| | (SEQ ID NO: 44) | (SEQ ID NO: 772) |
| 370 | TIMP3 | GGGATAAGTGAATTTTTT |
| | (SEQ ID NO: 44) | (SEQ ID NO: 773) |
| 371 | VHL | TTTATAAGCGTGATGATT |
| | (SEQ ID NO: 45) | (SEQ ID NO: 774) |
| 372 | VHL | TTTATAAGTGTGATGATT |
| | (SEQ ID NO: 45) | (SEQ ID NO: 775) |
| 373 | VHL | GGTGTTTTCGTGTGAGAT |
| | (SEQ ID NO: 45) | (SEQ ID NO: 916) |
| 374 | VHL | GGTGTTTTTGTGTGAGAT |
| | (SEQ ID NO: 45) | (SEQ ID NO: 917) |
| 375 | VHL | GTATATTGCGCGTTTGAT |
| | (SEQ ID NO: 45) | (SEQ ID NO: 776) |
| 376 | VHL | GTATATTGTGTGTTTGAT |
| | (SEQ ID NO: 45) | (SEQ ID NO: 777) |
| 377 | CDKN1C | ATGAAGAACGGTTAAGGG |
| | (SEQ ID NO: 46) | (SEQ ID NO: 892) |
| 378 | CDKN1C | ATGAAGAATGGTTAAGGG |
| | (SEQ ID NO: 46) | (SEQ ID NO: 893) |
| 379 | CDKN1C | TTAAGTTACGGTTATTAG |
| | (SEQ ID NO: 46) | (SEQ ID NO: 778) |
| 380 | CDKN1C | TTAAGTTATGGTTATTAG |
| | (SEQ ID NO: 46) | (SEQ ID NO: 779) |
| 381 | CDKN1C | TTAGTGTTCGTTTGGAAT |
| | (SEQ ID NO: 46) | (SEQ ID NO: 780) |
| 382 | CDKN1C | TTAGTGTTTGTTTGGAAT |
| | (SEQ ID NO: 46) | (SEQ ID NO: 781) |
| 383 | CAV1 | TTGGTATCGTTGAAGAAT |
| | (SEQ ID NO: 47) | (SEQ ID NO: 782) |
| 384 | CAV1 | TTGGTATTGTTGAAGAAT |
| | (SEQ ID NO: 47) | (SEQ ID NO: 783) |
| 385 | CAV1 | TTTTTGTCGCGGGAATTT |
| | (SEQ ID NO: 47) | (SEQ ID NO: 784) |
| 386 | CAV1 | TTTTTGTTGTGGGAATTT |
| | (SEQ ID NO: 47) | (SEQ ID NO: 785) |
| 387 | CAV1 | TAGATTCGGAGGTAGGTA |
| | (SEQ ID NO: 47) | (SEQ ID NO: 786) |
| 388 | CAV1 | TAGATTTGGAGGTAGGTA |
| | (SEQ ID NO: 47) | (SEQ ID NO: 787) |
| 389 | CAV1 | GAAGTGTTCGTTTTTGTT |
| | (SEQ ID NO: 47) | (SEQ ID NO: 788) |
| 390 | CAV1 | GAAGTGTTTGTTTTTGTT |
| | (SEQ ID NO: 47) | (SEQ ID NO: 789) |
| 391 | CDH13 | TTGTTTAGCGTGATTTGT |
| | (SEQ ID NO: 48) | (SEQ ID NO: 790) |
| 392 | CDH13 | TTGTTTAGTGTGATTTGT |
| | (SEQ ID NO: 48) | (SEQ ID NO: 791) |
| 393 | CDH13 | ATGTAAAACGAGGGAGCG |
| | (SEQ ID NO: 48) | (SEQ ID NO: 792) |
| 394 | CDH13 | ATGTAAAATGAGGGAGTG |
| | (SEQ ID NO: 48) | (SEQ ID NO: 887) |
| 395 | CDH13 | AAGGAATTCGTTTTGTAA |
| | (SEQ ID NO: 48) | (SEQ ID NO: 792) |
| 396 | CDH13 | AAGGAATTTGTTTTGTAA |
| | (SEQ ID NO: 48) | (SEQ ID NO: 793) |
| 397 | CDH13 | AATGTTTTCGTGATGTTG |
| | (SEQ ID NO: 48) | (SEQ ID NO: 794) |
| 398 | CDH13 | AATGTTTTTGTGATGTTG |
| | (SEQ ID NO: 48) | (SEQ ID NO: 795) |
| 399 | NDRG1 | GAGTAGGACGGTGTTAAG |
| | (SEQ ID NO: 49) | (SEQ ID NO: 796) |
| 400 | NDRG1 | GAGTAGGATGGTGTTAAG |
| | (SEQ ID NO: 49) | (SEQ ID NO: 797) |
| 401 | NDRG1 | AAATTTAACGTTGGGTAG |
| | (SEQ ID NO: 49) | (SEQ ID NO: 498) |
| 402 | NDRG1 | AAATTTAATGTTGGGTAG |
| | (SEQ ID NO: 49) | (SEQ ID NO: 799) |
| 403 | NDRG1 | GATAATGACGGTGTTAGT |
| | (SEQ ID NO: 49) | (SEQ ID NO: 800) |
| 404 | NDRG1 | GATAATGATGGTGTTAGT |
| | (SEQ ID NO: 49) | (SEQ ID NO: 801) |
| 405 | NDRG1 | TGGTTGTACGTTAGGAGT |
| | (SEQ ID NO: 49) | (SEQ ID NO: 802) |
| 406 | NDRG1 | TGGTTGTATGTTAGGAGT |
| | (SEQ ID NO: 49) | (SEQ ID NO: 803) |
| 407 | NDRG1 | GTTTTTATCGGGTTTACG |
| | (SEQ ID NO: 49) | (SEQ ID NO: 804) |
| 408 | PTGS2 | GTTTTTATTGGGTTATG |
| | (SEQ ID NO: 50) | (SEQ ID NO: 805) |
| 409 | PTGS2 | AGTTATTTCGTTATATGG |
| | (SEQ ID NO: 50) | (SEQ ID NO: 806) |
| 410 | PTGS2 | AGTTATTTTGTTATATGG |
| | (SEQ ID NO: 50) | (SEQ ID NO: 807) |
| 411 | PTGS2 | TTGGTTTTCGGAAGCGTT |
| | (SEQ ID NO: 50) | (SEQ ID NO: 910) |
| 412 | PTGS2 | TTGGTTTTTGGAAGTGTT |
| | (SEQ ID NO: 50) | (SEQ ID NO: 911) |
| 413 | PTGS2 | AAAGATTGCGAAGAAGAA |
| | (SEQ ID NO: 50) | (SEQ ID NO: 808) |
| 414 | PTGS2 | AAAGATTGTGAAGAAGAA |
| | (SEQ ID NO: 50) | (SEQ ID NO: 809) |
| 415 | PTGS2 | ATATTTGGCGGAAATTTG |
| | (SEQ ID NO: 50) | (SEQ ID NO: 810) |
| 416 | PTGS2 | ATATTTGGTGGAAATTTG |
| | (SEQ ID NO: 50) | (SEQ ID NO: 811) |
| 417 | THBS1 | TTATAAAACGGGTTTAGT |
| | (SEQ ID NO: 51) | (SEQ ID NO: 812) |
| 418 | THBS1 | TTATAAAATGGGTTTAGT |
| | (SEQ ID NO: 51) | (SEQ ID NO: 813) |
| 419 | THBS1 | AGGTATTTCGGGAGATTA |
| | (SEQ ID NO: 51) | (SEQ ID NO: 814) |
| 420 | THBS1 | AGGTATTTTGGGAGATTA |
| | (SEQ ID NO: 51) | (SEQ ID NO: 815) |
| 421 | THBS1 | GATTAGTTCGTTCGAAAG |
| | (SEQ ID NO: 51) | (SEQ ID NO: 816) |
| 422 | THBS1 | GATTAGTTTGTTTGAAAG |
| | (SEQ ID NO: 51) | (SEQ ID NO: 817) |
| 423 | THBS1 | AGTTTTTGCGTTATTTCG |
| | (SEQ ID NO: 51) | (SEQ ID NO: 818) |
| 424 | THBS1 | AGTTTTTGTGTTATTTTG |
| | (SEQ ID NO: 51) | (SEQ ID NO: 819) |
| 425 | TMEFF2 | GATGTTTTCGGTAATTTA |
| | (SEQ ID NO: 52) | (SEQ ID NO: 820) |
| 426 | TMEFF2 | GATGTTTTTGGTAATTTA |
| | (SEQ ID NO: 52) | (SEQ ID NO: 821) |
| 427 | TMEFF2 | ATAGGTTACGGGTTGGAG |
| | (SEQ ID NO: 52) | (SEQ ID NO: 822) |
| 428 | TMEFF2 | ATAGGTTATGGGTTGGAG |
| | (SEQ ID NO: 52) | (SEQ ID NO: 823) |
| 429 | TMEFF2 | TAAATTTGCGAACGTTTG |
| | (SEQ ID NO: 52) | (SEQ ID NO: 824) |
| 430 | TMEFF2 | TAAATTTGTGAATGTTTG |
| | (SEQ ID NO: 52) | (SEQ ID NO: 825) |
| 431 | TMEFF2 | TGAGGTTTCGTTTTAAGA |
| | (SEQ ID NO: 52) | (SEQ ID NO: 826) |
| 432 | TMEFF2 | TGAGGTTTTGTTTTAAGA |
| | (SEQ ID NO: 52) | (SEQ ID NO: 827) |
| 433 | PLAU | TTGGTTTGCGGTTATTA |
| | (SEQ ID NO: 53) | (SEQ ID NO: 828) |
| 434 | PLAU | TTGGTTTGTGGTTATTTA |
| | (SEQ ID NO: 53) | (SEQ ID NO: 829) |
| 435 | PLAU | GTTATTTACGTGTGTGGA |
| | (SEQ ID NO: 53) | (SEQ ID NO: 830) |
| 436 | PLAU | GTTATTTATGTGTGTGGA |
| | (SEQ ID NO: 53) | (SEQ ID NO: 831) |
| 437 | PLAU | TGTTTATGCGTTTATGGT |
| | (SEQ ID NO: 53) | (SEQ ID NO: 832) |
| 438 | PLAU | TGTTTATGTGTTTATGGT |
| | (SEQ ID NO: 53) | (SEQ ID NO: 833) |
| 439 | PLAU | GGATAAGTCGTGTTTTGA |
| | (SEQ ID NO: 53) | (SEQ ID NO: 834) |
| 440 | PLAU | GGATAAGTTGTGTTTTGA |
| | (SEQ ID NO: 53) | (SEQ ID NO: 835) |
| 441 | TMEFF2 | GTGAAGTTCGTTGTTTTT |
| | (SEQ ID NO: 52) | (SEQ ID NO: 908) |
| 442 | TMEFF2 | GTGAAGTTTGTTGTTTTT |
| | (SEQ ID NO: 52) | (SEQ ID NO: 909) |
| 443 | TMEFF2 | TTGTTAAACGTTTATCGG |
| | (SEQ ID NO: 52) | (SEQ ID NO: 836) |
| 444 | TMEFF2 | TTGTTAAATGTTTATTGG |
| | (SEQ ID NO: 52) | (SEQ ID NO: 837) |
| 445 | TMEFF2 | GAAGAATACGCGTATTTA |
| | (SEQ ID NO: 52) | (SEQ ID NO: 838) |
| 446 | TMEFF2 | GAAGAATATGTGTATTTA |
| | (SEQ ID NO: 52) | (SEQ ID NO: 839) |
| 447 | DNMT1 | TAGTAAATCGTGGAGTTT |
| | (SEQ ID NO: 54) | (SEQ ID NO: 840) |
| 448 | DNMT1 | TAGTAAATTGTGGAGTTT |
| | (SEQ ID NO: 54) | (SEQ ID NO: 841) |
| 449 | DNMT1 | AGTGGGTTCGTTTAAGTT |
| | (SEQ ID NO: 54) | (SEQ ID NO: 842) |
| 450 | DNMT1 | AGTGGGTTTGTTTAAGTT |
| | (SEQ ID NO: 54) | (SEQ ID NO: 843) |
| 451 | DNMT1 | TTTTTACGCGGAGTAGTG |
| | (SEQ ID NO: 54) | (SEQ ID NO: 844) |
| 452 | DNMT1 | TTTTTACGTGGAGTAGTG |
| | (SEQ ID NO: 54) | (SEQ ID NO: 845) |
| 453 | DNMT1 | GAGAGAGGCGATATTTTG |
| | (SEQ ID NO: 54) | (SEQ ID NO: 846) |
| 454 | DNMT1 | GAGAGAGGTGATATTTTG |
| | (SEQ ID NO: 54) | (SEQ ID NO: 847) |
| 455 | ESR1 | AGATATATCGGAGTTTGG |
| | (SEQ ID NO: 55) | (SEQ ID NO: 848) |
| 456 | ESR1 | AGATATTGGAGTTTGG |
| | (SEQ ID NO: 55) | (SEQ ID NO: 849) |
| 457 | ESR1 | GTTTGGTACGGGGTATAT |
| | (SEQ ID NO: 55) | (SEQ ID NO: 850) |
| 458 | ESR1 | GTTTGGTATGGGGTATAT |
| | (SEQ ID NO: 55) | (SEQ ID NO: 851) |
| 459 | ESR1 | TTAGTAGCGACGATAAGT |
| | (SEQ ID NO: 55) | (SEQ ID NO: 852) |
| 460 | ESR1 | TTAGTAGTGATGATAAGT |
| | (SEQ ID NO: 55) | (SEQ ID NO: 853) |
| 461 | ESR1 | TATGAGTTCGGGAGATTA |
| | (SEQ ID NO: 55) | (SEQ ID NO: 854) |
| 462 | ESR1 | TATGAGTTTGGGAGATTA |
| | (SEQ ID NO: 55) | (SEQ ID NO: 855) |
| 463 | ESR1 | TGGAGGTTCGGGAGTTTA |
| | (SEQ ID NO: 55) | (SEQ ID NO: 856) |
| 464 | ESR1 | TGGAGGTTTGGGAGTTTA |
| | (SEQ ID NO: 55) | (SEQ ID NO: 857) |
| 465 | APAF1 | TTTGGTATCGTTTAGAGT |
| | (SEQ ID NO: 56) | (SEQ ID NO: 858) |
| 466 | APAF1 | TTTGGTATTGTTTAGAGT |
| | (SEQ ID NO: 56) | (SEQ ID NO: 859) |
| 467 | APAF1 | GTATGAGTCGTGGTAGGA |
| | (SEQ ID NO: 56) | (SEQ ID NO: 860) |
| 468 | APAF1 | GTATGAGTTGTGGTAGGA |
| | (SEQ ID NO: 56) | (SEQ ID NO: 861) |
| 469 | APAF1 | GTGGATTCGGCGGGATTT |
| | (SEQ ID NO: 56) | (SEQ ID NO: 862) |
| 470 | APAF1 | GTGGATTTGGTGGGATTT |
| | (SEQ ID NO: 56) | (SEQ ID NO: 863) |
| 471 | APAF1 | TTTAGAGGCGGAGAAGAA |
| | (SEQ ID NO: 56) | (SEQ ID NO: 864) |
| 472 | APAF1 | TTTAGAGGTGGAGAAGAA |
| | (SEQ ID NO: 56) | (SEQ ID NO: 865) |
| 473 | APAF1 | GAAGAGGTAGCGAGTGGA |
| | (SEQ ID NO: 56) | (SEQ ID NO: 866) |
| 474 | APAF1 | GAAGAGGTAGTGAGTGGA |
| | (SEQ ID NO: 56) | (SEQ ID NO: 867) |
| 475 | HOXA5 | AGTTAGTCGGGTTTTAAG |
| | (SEQ ID NO: 57) | (SEQ ID NO: 868) |
| 476 | HOXA5 | AGTTAGTTGGGTTTTAAG |
| | (SEQ ID NO: 57) | (SEQ ID NO: 869) |
| 477 | HOXA5 | TTATAGGGTTCGGTTTTT |
| | (SEQ ID NO: 57) | (SEQ ID NO: 870) |
| 478 | HOXA5 | TTATAGGGTTTGGTTTTT |
| | (SEQ ID NO: 57) | (SEQ ID NO: 871) |
| 479 | HOXA5 | TTTTAAGGCGAGGTTAAA |
| | (SEQ ID NO: 57) | (SEQ ID NO: 872) |
| 480 | HOXA5 | TTTTAAGGTGAGGTTAAA |
| | (SEQ ID NO: 57) | (SEQ ID NO: 873) |
| 481 | HOXA5 | ATGATAGGCGTTTATTAA |
| | (SEQ ID NO: 57) | (SEQ ID NO: 874) |
| 482 | HOXA5 | ATGATAGGTGTTTATTAA |
| | (SEQ ID NO: 57) | (SEQ ID NO: 875) |
| 483 | RASSF1 | GTAGTTTTCGAGAATGTT |
| | (SEQ ID NO: 58) | (SEQ ID NO: 876) |
| 484 | RASSF1 | GTAGTTTTTGAGAATGTT |
| | (SEQ ID NO: 58) | (SEQ ID NO: 877) |
| 485 | RASSF1 | GGAAATCGGTAATTAGAA |
| | (SEQ ID NO: 58) | (SEQ ID NO: 878) |
| 486 | RASSF1 | GGAAATTGGTAATTAGAA |
| | (SEQ ID NO: 58) | (SEQ ID NO: 879) |
| 487 | RASSF1 | TTTGTGTCGTCGGGAAAT |
| | (SEQ ID NO: 58) | (SEQ ID NO: 880) |
| 488 | RASSF1 | TTTGTGTTGTTGGGAAAT |
| | (SEQ ID NO: 58) | (SEQ ID NO: 881) |
| 489 | RASSF1 | TAGTTTTCGCGTAGAATT |
| | (SEQ ID NO: 58) | (SEQ ID NO: 882) |
| 490 | RASSF1 | TAGTTTTTGTGTAGAATT |
| | (SEQ ID NO: 58) | (SEQ ID NO: 883) |

[0097] TABLE 3

Oligonucleotides used in differentiation between
adenocarcinoma and adjacent lung tissue.

| | | |
|---|---|---|
| No: | Gene | Oligo: |

| | | |
|---|---|---|
| 232:1184A | SFN | GAGTAGGTCGACGTTAT |
| | (SEQ ID NO: 40) | (SEQ ID NO: 884) |
| 232:1184B | SFN | GAGTAGGTTGAATGTTAT |
| | (SEQ ID NO: 40) | (SEQ ID NO: 885) |
| 383:1452A | CDH13 | ATGTAAAACGAGGGAGCG |
| | (SEQ ID NO: 48) | (SEQ ID NO: 886) |
| 383:1452B | CDH13 | ATGTAAAATGAGGGAGTG |
| | (SEQ ID N0: 48) | (SEQ ID NO: 887) |
| 232:1346A | SFN | AAAAGTAACGAGGAGGGT |
| | (SEQ ID NO: 40) | (SEQ ID NO: 888) |
| 232:1346B | SFN | AAAAGTAATGAGGAGGGT |
| | (SEQ ID NO: 40) | (SEQ ID NO: 889) |
| 153:374A | MGMT | TAGGTTATCGGTGATTGT |
| | (SEQ ID NO: 31) | (SEQ ID NO: 890) |
| 153:374B | MGMT | TAGGTTATTGGTGATTGT |
| | (SEQ ID NO: 31) | (SEQ ID NO: 891) |
| 350:697A | CDKN1C | ATGAAGAACGGTTAAGGG |
| | (SEQ ID NO: 46) | (SEQ ID NO: 892) |
| 350:697B | CDKN1C | ATGAAGAATGGTTAAGGG |
| | (SEQ ID NO: 46) | SE ID NO: 893) |

[0098] TABLE 4

Oligonucleotides used in differentiation between
sauamous cell carcinoma and lung tissue.

| | | |
|---|---|---|
| No: | Gene | Oligo: |

| | | |
|---|---|---|
| 401:40A | HLA-F | TATTTGGGCGGGTGAGTGT |
| | (SEQ ID NO: 10) | (SEQ ID NO: 894) |
| 401:40B | HLA-F | TATTTGGGTGGGTGAGTG |
| | (SEQ ID NO: 10) | (SEQ ID NO: 895) |
| 2035:2074A | CDKN2a | GGAGTTTTCGGTTGATTG |
| | (SEQ ID NO: 20) | (SEQ ID NO: 896) |
| 2035:2074B | CDKN2a | GGAGTTTTTGGTTGATTG |
| | (SEQ ID NO: 20) | (SEQ ID NO: 897) |
| 130:165A | GPIb beta | TTTGAGAGCGGGTGGGAG |
| | (SEQ ID NO: 7) | (SEQ ID NO: 898) |
| 130:165B | GPBb beta | TTTGAGAGTGGGTGGGAG |
| | (SEQ ID NO: 7) | (SEQ ID NO: 899) |
| 2172:1805A | MYC | GAGGGATCGCGTTGAGTA |
| | (SEQ ID NO: 34) | (SEQ ID NO: 900) |
| 2172:1805B | MYC | GAGGGATTGTGTTGAGTA |
| | (SEQ ID NO: 34) | (SEQ ID NO: 901) |
| 2191:310A | PAX6 | TATTGTTTCGGTTGTTAG |
| | (SEQ ID NO: 36) | (SEQ ID NO: 902) |
| 2191:310B | PAX6 | TATTGTTTTGGTTGGTTAG |
| | (SEQ ID NO: 36) | (SEQ ID NO: 903) |
| 130:175A | GPIb beta | GTGGGAGCGGAAGTTTGA |
| | (SEQ ID NO: 7) | (SEQ ID NO: 904) |
| 130:175B | GPIb beta | GTGGGAGTGGAAGTTTGA |
| | (SEQ ID NO: 7) | (SEQ ID NO: 905) |
| 2212:1793A | RARB | TAGTAGTTCGGGTAGGGT |
| | (SEQ ID NO: 39) | (SEQ ID NO: 906) |
| 2212:1793B | RARB | TAGTAGTTTGGGTAGGGT |
| | (SEQ ID NO: 39) | (SEQ ID NO: 907) |
| 2135:868A | LKB1 | AGGGAGGTCGTTGGTATT |
| | (SEQ ID NO: 29) | (SEQ ID NO: 912) |
| 2135:868B | LKB1 | AGGGAGGTTGTTGGTATT |
| | (SEQ ID NO: 29) | (SEQ ID NO: 913) |
| 2034:430A | CDKN1B | TTTGATTTCGAGGGGAGT |
| | (SEQ ID NO: 19) | (SEQ ID NO: 914) |
| 2034:430B | CDKN1B | TTTGATTTTGAGGGGAGT |
| | (SEQ ID NO: 19) | (SEQ ID NO: 915) |
| 2153:374A188 | MGMT | TAGGTTATCGGTGATTGT |
| | | (SEQ ID NO: 890) |
| 2153:374B188 | MGMT | TAGGTTATTGGTGATTGT |
| | | (SEQ ID NO: 891) |

[0099] TABLE 5

Oligonucleotides used in differentiation between
adenocarcinoma and squamous cell carcinoma.

| | | |
|---|---|---|
| No: | Gene | Oligo: |

| | | |
|---|---|---|
| 2338:1413A | VHL | GGTGTTTTCGTGTGAGAT |
| | (SEQ ID NO: 45) | (SEQ ID NO: 916) |
| 2338:1413B | VHL | GGTGTTTTTGTGTGAGAT |
| | (SEQ ID NO: 45) | (SEQ ID NO: 917) |
| 2035:2074A | CDKN2a | GGAGTTTTTCGGTTGATTG |
| | (SEQ ID NO: 20) | (SEQ ID NO: 896) |
| 2035:2074B | CDKN2a | GGAGTTTTTGGTTGATTG |
| | (SEQ ID NO: 20) | (SEQ ID NO: 897) |

1. A method for detecting and differentiating between lung cell proliferative disorders associated with at least one gene and/or their regulatory regions from the group comprising MDR1, APOC2, CACNA1G, EGR4, AR, RB1, GP1b beta, MYOD1, WT1, HLA-F, ELK1, APC, ARHI, BCL2, BRCA1, CALCA, CCND2, CDH1, CDKN1B, CDKN2a, CDKN2B, CD44, CSPG2, DAPK1, GGT1, GSTP1, HIC-1, LAP18, LKB1, LOC51147, MGMT, MLH1, MNCA9, MYC, N33, PAX6, PGR, PTEN, RARB, SFN, S100A2, TFF1, TGFBR2, TIMP3, VHL, CDKN1C, CAV1, CDH13, NDRG1, PTGS2, THBS1, TMEFF2, PLAU, DNMT1, ESR1, APAF1, HOXA5 and RASSF1 in a subject, said method comprising contacting a target nucleic acid in a biological sample obtained from said subject with at least one reagent or a series of reagents, wherein said reagent or series of reagents, distinguishes between methylated and non methylated CpG dinucleotides within the target nucleic acid.

2. A method according to claim 1 wherein, said method differentiates between at least two members of the following group of medical conditions: adenocarcinoma, squamous cell carcinoma and lung tissue.

3. A method according to claim 1 wherein, said method differentiates between adenocarcinoma and lung tissue.

4. A method according to claim 1 wherein, said method differentiates between squamous cell carcinoma and lung tissue.

5. Use of methods according to claim 1 wherein, said methods are used to differentiate between adenocarcinoma and squamous cell carcinoma.

6. A method according to any one of claims 1 to 5 comprising the following steps:
obtaining a biological sample containing genomic DNA
extracting the genomic DNA
converting cytosine bases in the genomic DNA sample which are unmethylated at the 5-position, by treatment, to uracil or another base which is dissimilar to cytosine in terms of base pairing behaviour;
fragments of the pretreated genomic DNA are amplified, and
identification of the methylation status of one or more cytosine positions.

7. The method according to claim 6, characterised in that the reagent is a solution of bisulfite, hydrogen sulfite or disulfite.

8. The method as recited in claims 6 and 7, characterised in that the amplification is carried out by means of the polymerase chain reaction (PCR).

9. The method as recited in one of the claims 6 through 8, characterised in that the amplification is carried out by means of a heat-resistant DNA polymerase.

10. The method as recited in one of the claims 6 through 9, characterised in that more than ten different fragments having a length of 100-2000 base pairs are amplified.

11. The method as recited in one of claims 6 through 10, wherein the amplification step is carried out using a set of primer oligonucleotides comprising SEQ ID NO: 308 to SEQ ID NO: 427.

12. The method as recited in one of the claims 6 through 11, characterised in that the amplification of several DNA segments is carried out in one reaction vessel.

13. The method as recited in one of claims 6 through 12, characterised in that the amplification step preferentially amplifies DNA which is of particular interest in healthy and/or diseased lung tissues, based on the specific genomic methylation status of lung tissue, as opposed to background DNA.

14. The method according to one of claims 6 through 13, characterised in that the methylation status within at least one gene and/or their regulatory regions from the group comprising MDR1, APOC2, CACNA1G, EGR4, AR, RB1, GP1b beta, MYOD1, WT1, HLA-F, ELK1, APC, ARHI, BCL2, BRCA1, CALCA, CCND2, CDH1, CDKN1B, CDKN2a, CDKN2B, CD44, CSPG2, DAPK1, GGT1, GSTP1, HIC-1, LAP18, LKB1, LOC51147, MGMT, MLH1, MNCA9, MYC, N33, PAX6, PGR, PTEN, RARB, SFN, S100A2, TFF1, TGFBR2, TIMP3, VHL, CDKN1C, CAV1, CDH13, NDRG1, PTGS2, THBS1, TMEFF2, PLAU, DNMT1, ESR1, APAF1, HOXA5 and RASSF1 is detected by hybridisation of each amplificate to an oligonucleotide or peptide nucleic acid (PNA)-oligomer.

15. A method according to claim 14, characterised in that the oligonucleotide or peptide nucleic acid (PNA)-oligomer is taken from the group comprising SEQ ID NO: 428 to SEQ ID NO: 917.

16. The method according to claims 6 through 15, characterised in that the amplificates are labelled.

17. The method as recited in claim 16, characterised in that the labels of the amplificates are fluorescence labels.

18. The method as recited in claim 16, characterised in that the labels of the amplificates are radionuclides.

19. The method as recited in claims 16, characterised in that the labels of the amplificates are detachable molecule fragments having a typical mass which are detected in a mass spectrometer.

20. The method as recited in one of the claims 6 through 19, characterised in that the amplificates or fragments of the amplificates are detected in the mass spectrometer.

21. The method as recited in one of the claims 19 and 20, characterised in that the produced fragments have a single positive or negative net charge.

22. The method as recited in one of the claims 19 through 21, characterised in that detection is carried out and visualised by means of matrix assisted laser desorption/ionization mass spectrometry (MALDI) or using electron spray mass spectrometry (ESI).

23. A method according to claims 1 through 5, comprising the following steps:
a) obtaining a biological sample containing genomic DNA
b) extracting the genomic DNA
c) digesting the genomic DNA comprising at least one or more CpGs of the genes MDR1, APOC2, CACNA1G, EGR4, AR, RB1, GP1b beta, MYOD1, WT1, HLA-F, ELK1, APC, ARHI, BCL2, BRCA1, CALCA, CCND2, CDH1, CDKN1B, CDKN2a, CDKN2B, CD44, CSPG2, DAPK1, GGT1, GSTP1, HIC-1, LAP18, LKB1, LOC51147, MGMT, MLH1, MNCA9, MYC, N33, PAX6, PGR, PTEN, RARB, SFN, S100A2, TFF1, TGFBR2, TIMP3, VHL, CDKN1C, CAV1, CDH13, NDRG1, PTGS2, THBS1, TMEFF2, PLAU, DNMT1, ESR1, APAF1, HOXA5 and RASSF1 with one or more methylation sensitive restriction enzymes, and
d) detection of the DNA fragments generated in the digest of step c).

24. A method according to claim 23, wherein the DNA digest is amplified prior to Step d).

25. The method as recited in claim 24, characterised in that the amplification is carried out by means of the polymerase chain reaction (PCR).

26. The method as recited in one of the claims 24 and/or 25, characterised in that the amplification of more than one DNA fragments is carried out in one reaction vessel.

27. The method as recited in one of the claims 24 through 26 characterised in that the polymerase is a heat-resistant DNA polymerase.

28. An isolated nucleic acid of a pretreated genomic DNA according to one of the sequences taken from the group comprising SEQ ID NO: 76 to SEQ ID NO: 307 and sequences complementary thereto.

29. An oligomer, in particular an oligonucleotide or peptide nucleic acid (PNA)-oligomer, said oligomer comprising at least one base sequence of at least 10 nucleotides which hybridises to or is identical to a pretreated genomic DNA according to one of the SEQ ID NO: 76 to SEQ ID NO: 307 according to claim 28.

30. The oligonucleotide as recited in claim 29; wherein the base sequence includes at least one CpG or TpG dinucleotide sequence.

31. The oligonucleotide as recited in claim 30; characterized in that the cytosine of the at least one CpG or TpG dinucleotide is/are located approximately in the middle third of the oligomer.

32. An oligomer, in particular an oligonucleotide or peptide nucleic acid (PNA)-oligomer, according to one of the sequences taken from the group comprising SEQ ID NO: 428 to SEQ ID NO: 917.

33. A set of oligonucleotides, comprising at least two oligonucleotides according to any of claims 29 to 32.

34. A set of oligonucleotides, comprising at least two oligonucleotides according to SEQ ID NO: 884 to 893.

35. One or more isolated nucleic acid(s) taken from the group. according to SEQ ID NO: 59 to 63.

36. A set of oligonucleotides, comprising at least two oligonucleotides according to SEQ ID NO: 894 to 907, 912 to 915, and 890 and 891.

37. One or more isolated nucleic acid(s) taken from the group according to SEQ ID NO: 62, 64 to 70, 73, and 74.

38. A set of oligonucleotides, comprising at least two oligonucleotides according to SEQ ID NO: 896, 897, 916, and 917.

39. One or more isolated nucleic acid(s) taken from the group according to SEQ ID NO: 65 and 75.

40. A set of oligomers, peptide nucleic acid (PNA)-oligomers and/or isolated nucleic acids as recited in claims 33 through 39, comprising oligomers for detecting the methylation state of all CpG dinucleotides within one or more of the sequences according to SEQ ID NO: 1 to SEQ ID NO: 58 and sequences complementary thereto.

41. Use of a set of oligomers or peptide nucleic acid (PNA)-oligomers according to any of claims 29 through 34, 36, and 38 as probes for determining the cytosine methylation state and/or single nucleotide polymorphisms (SNPs) of sequences according to 1 to SEQ ID NO: 58 and sequences complementary thereto.

42. Use of a set of oligonucleotides according to claim 34 or nucleic acid(s) according to claim 35 for the differentiation between adenocarcinoma and lung tissue.

43. Use of a set of oligonucleotides according to claim 36 or nucleic acid(s) according to claim 37 for the differentiation between squamous cell carcinoma and lung tissue.

44. Use of a set of oligonucleotides according to claim 38 or nucleic acid(s) according to claim 39 for the differentiation between adenocarcinoma and squamous cell carcinoma.

45. A set of at least two oligonucleotides or peptide nucleic acid (PNA)-oligomers as recited claim 29, as primer oligonucleotides for the amplification of DNA sequences of one of SEQ ID NO: 76 to SEQ ID NO: 307 according to claim 28 and/or sequences complementary thereto and segments thereof.

46. Use of a pretreated genomic DNA according to claim 28 for the determination of the methylation status of a corresponding genomic DNA and/or detection of single nucleotide polymorphisms (SNP).

47. A set of oligonucleotides or peptide nucleic acid (PNA)-oligomers as recited in claims 33, 34, 36, or 38 characterised in that at least one oligonucleotide is bound to a solid phase.

48. A set of oligonucleotides or peptide nucleic acid (PNA)-oligomers as recited in claims 33, 34, 36 or 38 , characterised in that all members of the set are bound to a solid phase.

49. A method for manufacturing an arrangement of different oligomers or peptide nucleic acid (PNA)-oligomers (array) for analysing diseases associated with the corresponding genomic methylation status of the CpG dinucleotides within one of the SEQ ID NO: 1 to SEQ ID NO: 58 and sequences complementary thereto , wherein at least one oligomer according to any of the claims 33, 34, 36 or 38 is coupled to a solid phase.

50. An arrangement of different oligomers or peptide nucleic acid (PNA)-oligomers (array) obtainable according to claims 47 and 48.

51. An array of different oligonucleotide- and/or PNA-oligomer sequences as recited in claim 50, characterised in that these are arranged on a plane solid phase in the form of a rectangular or hexagonal lattice.

52. A nucleic acid or peptide nucleic acid array for the analysis of lung cell proliferative disorders associated with the methylation state of genes comprising at least one nucleic acid according to one of the preceding claims.

53. The array as recited in and of the claims 50 through 62, characterised in that the solid phase surface is composed of silicon, glass, polystyrene, aluminium, steel, iron, copper, nickel, silver, or gold.

54. A kit comprising a bisulfite (=disulfite, hydrogen sulfite) reagent as well as oligonucleotides and/or PNA-oligomers according to one of the claims 29 through 39.

55. The use of oligonucleotides or peptide nucleic acid (PNA)-oligomers according to SEQ ID NO: 76 to SEQ ID NO: 917 for the detection of a predisposition to differentiation between subclasses, diagnosis, prognosis, treatment and/or monitoring of lung cell proliferative disorders.

56. A DNA sequence according to one of the sequences taken from the group comprising SEQ ID NO: 76 to SEQ ID NO: 307 and sequences complementary thereto for use in the analysis of cytosine methylation within said nucleic acid for the detection of a predisposition to, differentiation between subclasses, diagnosis, prognosis, treatment and/or monitoring of lung cell proliferative disorders.

The application's sequence listing, which the Patent Office published only in electronic form, follows.

SEQUENCE LISTING (917 sequences)

SEQ ID NO: 1 - DNA, 2932 bp, Homo Sapiens
gccaagaacaaaatatatcaagataaggaaaatttgtagtcaagaatagaaaaaaattatggctttgaagtatgagttatttaaagaaagtggaaacatcctcagactatgcagtaaaaaacaaagtgattttcttcttctaaacttatgcaataaactgataggtaatatgtgaaagtcatagaatgtagactagaggatacaacaaacctatttcctctatgttcataagaagtaagaaaagctctgatgtgagttagcattgctttacaattttgaattgtgcagattgcacgtacttttcctcagtttgaagtaaatagtggacaggaaaaaatattaaatgttggcagtaaatatggaaggaaattacaactaatgtaatatgctaaaacatgctatgtttattttactaatttgaattaaaatgtaagaatttaaaatgccctggaaaaacacgggcattgatctgacgtctgaagttttaaaatattacacactttgaaatagcatttgtaccttgaaatacctgtctctatatattttttaaaacttcctttttctttcattccatttatcatcaaataaaggatgaacagatgtaactcagaaactgtcaagcatgctgaagaaagaccactgcagaaaaatttctcctagccttttcaaaggtgttaggaagcagaaaggtgatacagaattggagaggtcggagtttttgtattaactgtattaaatgcgaatcccgagaaaatttcccttaactacgtcctgtagttatatggatatgaagacttatgtgaactttgaaagacgtgtctacataagttgaaatgtccccaatgattcagctgatgcgcgtttctctacttgccctttctagagaggtgcaacggaagccagaacattcctcctggaaattcaacctgtttcgcagtttctcgaggaatcagcattcagtcaatccgggccgggagcagtcatctgtggtgaggctgattggctgggcaggaacagcgccggggcgtgggctgagcacagccgcttcgctctctttgccacaggaagcctgagctcattcgagtagcggctcttccaagctcaaagaagcagaggccgctgttcgtttcctttaggtctttccactaaagtcggagtatcttcttccaaaatttcacgtcttggtggccgttccaaggagcgcgaggtaggggcacgcaaagctgggagctactatgggacagttcccaagtgtcaggctttcagatttcctgaacttggtcttcacgggagaagggcttcttgaggcgtggatagtgtgaagtcctctggcaagtccatggggaccaagtggggttagatctagactcaggagctcctggagcagcgcccaaaccgtagtggcactggaccatgttgcccggagcgcgcacagcccgcgcggtgcggggacctgctctctgagcccgcgggcggtgggtgggaggaagcatcgtccgcggcgactggaaccgggagggagaatcgcactggcggcgggcaaagtccagaacgcgctgccagacccccaactctgccttcgtggagatgctggagaccccgcgcacaggaaagcccctgcagtgcccatcgcggccagagcagctggggcatcaacggcgggcgctccctcttactgctctctggcttcgacgggggactagaggttagtctcacctccagcgcgcctgaggctcatgcatttggctaatgagctgcggtttctcttcaggtcgggatggatcttgaaggggaccgcaatggaggagcaaagaagaagaacttttttaaactgaacaataaaaggtaactagcttgtttcattttcatagtttacatagttgcgagatttgagtaatttatttctagcctccagctctgaaataaatgacatgttgttgtttttaattatttttaagaaacgcaagctagcctttggaatcaatatccctgcttagagcagaagtttgttggctgagtggagcacagcatatgcattttccctgtcttttttgttctttcttttaatgatacataatattttacatatttatgaaatggggtacatggaagcgttttttacatgcccggaatgtgtaatgatcaagtccgggtatttgaaggatacatcaccttaggtatatttcatttctatgtgttgataacattttaagtcttctagctactttgaaatatacaatatattgctaactgtagtcaccctcgtctgctatcgaacattggaacttatttgtcctatccaaccgttcttagtcattcaccaacctcttttcatttcacctttttacccttcccggcctctttcccttagtcttggtgtgcctctttctcagctttcctgccccagacaggcggatgctcatatgtgtttctgtcttatgaacttctgcttttcaagtggtgttggtcgcccacacgtgagccatatgctgctggtgatctgctctgtggtccaggctcttgcttccggtaaatggctatgtaaacatcgcgtttgtggcctggctgatgagacagaaggtcaaaagtacatttaggttgttaactggcaataaatatctgtatataatattggtaatgtaatcatatagggaaaataattatttaaagtaaattttgatcatggtgctctgcctttatagaatatttaaaacttcactaaatagattcattgttagtagtaaattgtaaaatagactagtaagtttaataatattagaaactgtaatgtaaattataagataaattagctaaacacattaatattataagaaaccaagcttttcagtgtaagagaaaaaatacaaatgtggaaatcaaatacatttttaaaaataatgttaagtttgaattagaaatttcaatatgaatt

SEQ ID NO: 2 - DNA, 7432 bp, Homo Sapiens
atctgaagccagagtcacccagaggagaaagagttggaattgagaactcaaggaatgcttggaagtgatcgggctcgagcccacctaggaagaaacagaggctggagacatgagactgtgttgctatttcctctcatcaacccttgggccctattgaggccctaccacaagcctggccctgcagcccagtgactaggagaaattagacacaagataataataacagcaatgatcttttttttttttctgagacggagtcttgctctttcgcccaggctggactgcagtggcgcgatctcggctcaatgcaagctccacctcccaggttcacgccattctcctgcctcagcctcccgagtagctaggactacaggcgcctgccaccacgcctggctaatttttcatatttttagtagagatggggtttcaccgtgttagccaagatggtctcaatctcctgacctcgtgatccgcctgcctcggcctcccaaagtgttggggttacaggcatgagccaccgcgcctggccaacagcaatgatctttgagcacctatattgccagtctccacggtaagagctttcttcattttttgttttgttttgtttcaagacagagtcttgctctgtcacccaggctggagtgcagtggtgtgatcgcggctcactgcagccttcacttcccgggttcaagccattctcctgcctcagcctcccaagtagctgggattacaggcacgcatcactacttctggctaatttttgtatttttagtagggacagggtttttcaccatgttggccaggttggtctcaaactcctggcctcatatgatctgcccacctcggcctcccaaagtgctgggattacaggcgtgagccactgcgcctttctttgtatttgttcaagtaatatactgaaatatgtactgtgcctcccactttatggaggaggaaactgaggccagcaaatgaggctgtcatgggaggtggagacaggatttgaacctgcctcagtgcaggaggctcaagagcctctgtcttctctcagggcactgtgtgggagggtgagaaggagggaggcccacagaggcatgacctctgattgccactgtcacctgggccctgctctctgaagtctctgccaagcggggaggtggccgggggagggccctgctctgtgcagcctcccctcccccggcccgcagagttgagcacagagggacagaggcacggaacccccagaaatgtccctcctcagaaacaggctccaggccctgcctgccctgtgcctctgcgtgctggtcctggcctgcattgggggtgagaagaagtgggtggagggatgtggggcccacacctggtgggtgtgagtgtggctgtgtgtcctgtggctctgtagccacgtgagacatgagtacggagtgtgtgcgtttcatggcgtgcgtatgcatgtgcgtgtcggggagtgtgtgtgtcggtggctgagagtgaagtgtgaatgtcacattggtacaaactgggatcatctgtgtgtgtgcacgtgcgtgcgtggaagtgggagtatgcagtcgtggtaaaaaagtgcatgtctgtgtgcatatgtgtatttgtgtgcacctgtctctctgtggggtatgtgtgtgcaaaatatttgagtgtgtggacatgtgtgagggggtgagtgtgtgctggtgtgtacgtctgtgttttgcatatgcatttttttttttttttttgagacggagtctcactctgtcacccaggctggagtgcagtggtagcagtggtgcgatcttggctcactgcatcatccgcctacccgtttcaagggattctcctgcctcagtcttcagagtatttgggactacagacacacgccaccatgcctggctattttttttttttgagacggagtctcgctctgttacccaggctggagtgcagtggcgtgatcttggctcactgcaacgtccgcctcccgggttcacgccattctcctgcctcagcctcccgagtagctgggactacaggagcccaccaccacgcctggctaattttttgtatttttactagagacggggtttcgccgtgttagccaggatggtctccatatcctgacctcgtgatccgcctgcctcggccttccaaagtgctaggattataggcgtgagccactgcgcctggccaatgcctggctaatttttttatatttttggtagagacagggttttgccatgttgcccaggctggtcttgaaatcctgacctcaggtgatccgcccgccttggcctcccaaagtgctgggattacaggcatgagccaccacgcccggccatgtactttatgttaaaatgggatcatattctagatcagcattatccagtagaaatttaaatttttaatacagggccaggcacggtggctcatgcctgtaatcccagcactttcggaggccgaggcgggtggatcgcaaggtcaggagatttgagatcatcctggctaacagatgggtaaaaacccatctctactaaaaatacaaaaaattagccatgcatggtggcatgcgcctgtagtcccagctactcgggaggctgaggccggagaatcacttgaacccgggaggcagaggttgcagtgagccgagatcgcgccactgcattccaacctgggtgacagagcgagactccgtctgaaaaaaaaaaaaaatttaacacgtatgtagacaatgtgcaaggcaccattccatgtgcatcgtatgtagtaactcttaattctcacgataaccctgaggtagatattattaccccgttctacaaaaggagaaacagtcctggggagacaggataagtcaccggccaaggcacacagctagctacatgtggcccccgcgtgacggctggtctctgtaggcgaggctttgtccagatgcgtgggtagaaggtctggcccggaaagaggaactgacagcaaggctaagccaatgtctgcccctgggggcagaaagtcacctcctgctctccctccactgtccacagaggtagctcagacagggtgggggtcacaggagaacgaagggagaagggggtagttcctgggcagcaaaatcaggtggtgaagggaggcatcagaggatggcaattagagaggccattagaggggaaccacaggcagacagggtgacaggagggactactgacacaaggtgaagagatggcccagccggacggggtggctcacatctgtaatcccagcattttgggagcccgaggtgggtggatcacttgaggtcaggagttcgaggccccaacatggcaaaaccccatctcttctaaaaatacaaaaattagccgggcatgatggcagatgcctgtaatccctgctactcgggaggctgaggcaggaaaattgcctgaatccaggaggtggaggttgcaatgagacgagatcatgacactgcactccaccctgggcaacagagcaagagactgactctgtctcataaaaaaaaagaaaaaagaaaaaaaaaaagagatggctgatggttaaagaggggttagcggtcaggggacacataagggtaaaggcaggaggcaagaggactggcagggggctgcccctgggccaccgggagcgacacaggatgagcatggagggaaagggagaaggggattctagggtcccagcctacccaagttgccctctggttccacctagcatgccagccagaggcccaggaaggaaccctgagccccccaccaaagctaaagatgagtcgctggagcctggtgaggggcaggatgaaggagctgctggagacagtggtgaacaggaccagagacgggtggcaatggttctggtgagggtgtgctgggctgggtggtgggaggggactcctgggtctgagggaggaggggctggggcctggacccctgagtctcagggaggaggaaagggtgggagtggggctgtgacccctaggtctgggaggagtggagggttagagctgagagcaggaactcctaggtcacagagaggagcggataaatggggcagagaacacctggggagagctggggcctccactgtgatgtcctctctcctgtaggagcccgagcaccttccggggcttcatgcagacctactatgacgaccacctgagggacctgggtccgctcaccaaggcctggttcctcgaatccaaagacagcctcttgaagaagacccacagcctgtgccccaggcttgtctgtggggacaaggaccagggttaaaatgttcataaaagccaggtgtggttgtggcgggtgcctgtagtcccagctactcaggaggctgaggtaggatgatggcttgagcccaggagttcgagaccagcctgggcaacacagcgagatctcttgggggtaaaacaaaaagaaaaaaaaaagttcatacttctccaataaataaagtctcacctgtgtccctgtctggatccttccccagtgtggccagaaaaaaacccaccccactgcctcccaggaatcaatgagtagaagaggtgacacctgatggggaaggaagagtagggaggtcgggaagggtatcaaggaataacaccctattgtgggcttgcggagaatgggggacttcaaggcgtgtcagtttcaggagggtgagggcaggagcgtgggtggagtcagcaggtccccatgatggccctcactgagagcttcgcccttgtctcctacaagctctgactccattcccagtgggcacccagcacctccaacccctccacagcccccaacccagcctctgtcggaggcgaattctcagagtgagggttccctgtcacttgagagaaggttccctgtgacgtgaccttgggggacgtcattgccctttctgtccccacccaccccctccgcagttctgttggccaggactttggcctagacaaaggatgggggttgtggctgtggagcggaagtgggtctcaaccactataaatcctctctgtgcccgtccggagctggtgaggacagcctgccagagtctggtaagaaagggactcagggtgcggggacaggggggcgtcagcagggagagggcaaagatcgataaagcaggaattttaagaggcacaatattagaagcccgtgttggaaccatgactgtgtgtgtgtgtgtgtgtgtgtgtgtgtgtgtgtgtgtgtgtgagagagagagagagggagatggagtctcgctatgtagcccaggctagactcaaactcctgggctcaagcaatcctcctgcctcagcctccccagtagctgggactacaggtgcaccaccacactccacaaatcacagaatttagaactgtagactatttgagcttctgcttagagttagggtggctgaggtggggaggatcccttgagcccaggagtttgaggatgcagtgagctgtgatcttgccaccgtgttccagcctgggtgacagagaaaccccatttctaaaaaagagaaagaaaaagggataggtacaatggctcatgcctgtaatcccagcactctgggaggccgaggcgggtggatcacttgaggtcaggagttcgacaccagccttaccagcatggtgaaaccgcatctatactaaaaatacaaaaattggccgggtgtggtagcatatgcctgtaatcccagctattccagaggctgagacaggagaattgcttgaacccaggaagcggaggttgcagtgagcccagatcgtgccactgtactctagcctgggtgacagagcaagactcagtcttggcggaaaaaaagaatgaaaaaatttaaaaaactaaaaaagaactgtaggctgggcgtggtggcttacacttgtaatccaaacgctttgggaggccaaggcaaacggatcacttgatgtcaggagttggagaccagcctggccaacatggtgaaaccccgtctctactaaaaatacaaaaattagacaggcatggtggtgcatgcttgtatttccagttactcaggaggctgaggcaggagaatcgctcgaacccggaagacagaggttgcggtgagccaaaattgcgccatcgcactccagcctgggcgagagaacaagaccttgtcttggaaaaaaaaaaagaattgtagaccatttgcttgtgttctttctccggggatcagatctcaccctctttctgccgtacttcctcatctcctacgtgtggatgatgatattgtgccctgtgcatgttcttcgtcaccaaaagtgcctctctcatagagcaggtgagaactcagtgaggagatgcagggacatgaggtctgacttagggcagagccctaaggtaacacatttgatctactgtaggtccttaatggtgtctgcagagcacctccctgcactgactcagccttagcaaagggcagaggctttgctgtgttccctgctgggcccagaactgtttaggtgctcaagaaagccttctaggctgggctcagtggctcacacctgtactcccagcaccctggggaggccgagatgggaggatcgcttgagcccaggagttccagaccagcctgggcaacaaaacaagtctcccatctctacaaaagaataaaaattagcagctgggcatggtggctcatgcctgtaattccagcactttgggaggccaaggcaggcaaatcacttgaggttaggagttcaagaccagcctggccaacatggtgaaaccccatctctactaaaaatacaaaaatcaggtggggcacagtggctcaagcctgtaatcctagcactttgggaggccaaggtgggcggatcacgaggtcagaagttcgagaccagcctggccagcatggtgaaaccccatctctactaaaaatacaaaatattagccgggcatggtggcaggtgcttgtgattccagctccttgggaggctgaggcagaagaattgctagaaccctggaggcagaggttgcagtgagccgagaacacgccactgcactccagcctgggtgacagagcgagactccatctcaaaaaatacgaaaacaaaaatcagccgggtggtggcgggtgcctgtaatcccagctactggggaggctgaggcaggagaattgcttgaacctgggaggtgggggttgcagtgagccaagattgcaccactgcactccagcctgggcaacagagtgagattccatctcaaaaaagaaaaaaataataattaaaatgttaaaatcaggagtagaatcacagaatgttggaaagtgaggcccaagaagggggctgtgtccaagtccatgcatgggaaacttgactgggacaccgagctcacacagagcaggatctcagtcccccccaccagagtggggcgtgaccacaggaacagccgcctccagtcagcctgccacatgacaccccctcaatgttccagg

SEQ ID NO: 3 - DNA, 12423 bp, Homo Sapiens
tctatctgagtccttcttgctgcagagaaagccttcctgtgacctcatcctttcccctaaatgttgggaaatgctcctgagtcctgtccttgacacatacatcttccttgggttgagggatggggactgggacacatgctttgggaagggcaggtgcagagtgatggggctgacggggtgggggaagcagggggaggagctgtccctctgaggcctttgggaatcggctgtgccaggcatcctcagccctccagctaagcaacacagagagccaaaagaggctactagagacaagaaggccttcatggggccactgcttgtgggggatgtcagcagtggggaggagtgaagcaggaaggaaccgggagactggatggaattgctcccttcacacggtcacacatagccacacatggtcactgggaccagagtcagctctgtctgggcagccaggccctcagtgcaagccaccagcccatctggaggggattagtgctccggccaacaaggtcagctggccccttcctagctggagcctactcaaccttgccaggaagtcagagagctggacaagtggagcccagcctggggaggtggaagagagggaggatggagcatggtgaagcacaggtggcctttttggcagccccagccctggctttggaacagtctgggcagtgtgccaacccctcttgccactgtcgtcccattgaccctcatgaatgagttgcgaggcagttaccttcagcctcctatggataaatattcgaggcccagagagggtaagagacctgcctgcgacccctcagcacttctgtttctctctggggtcttgagggtacaataaagacccctaaggcttcctcttctcgcaggaggtccaggcgcagctgtgggggagggtgcccttggtgtcttctgtccctgcagccagtctgctttctactcggcagctcctctctccctcctgggatgagatgtgcacgcgatgatgggattctgtaaatgggttgggaagaaggagttacctccttaaagggttagttctcccaggagtgctcgaatttctaaagggggcagggtcccacataaatctcactcagaagcaggattataagagttcctgcagcatcccttcccctttgctggtccctcttgagtgtgcaccctgttctaccagcggaacacctgcgggccagggtcactggagacagggccataccgtctgggcggtcacttaagtaacttcatcattctgagcaccccccttccttatctgaaaggtggggggccatccacccagctctcagggctgttaaggtgactaaatgggataatggttgtatcatccctgagcaaagggtatcacagatgggaagattatcttagctccgcagggagccagatgggctgtgagggaggggtaaaggcagggctggagggggctggaggggctggctgagcagggtatatatggggggggttcttcctcaaacccagaaaaactcttagttaggcttagtgtctttgttgagaaactgaggcccaaagaaaggaatttcttgtccctttgtttccctttccctgcctgaggtcattcattcacctaacaactttgtgcccgacactagacaaggccctagtgagcaaaatgaacatagcccctctgggaacacagagcctagatagggagatgatcatttcattactgcaaacacaaacatataatcccagcctgggctaagtgctgtgaagttccagacttgtgtctggctcggtgctgtatcctaagcaccttggcacttaagtggcattgaaatacttgctggaaagaaggccactctgaggaggtgatgtcagagctgaggcttggagggctggagttaaataaagatggtttcaggtcttctttgccttccctgtaggttctgcctctgcctcctctctggcactcaggctaagggtaagcatctccgactggccatcagccccaacatgccgagtacagggatcagatcctgtcttgcgtggccggtctcccctaggtcctgaacccagggaagtgcatgtggatctcaatttatctagatggtgcgtttgtgcctgccctcctttcgggcatgttctagaacagagttcagtccagagcccaggggtggccgggatgatggatgagggtgtggggcctgctgaccaccaggggacctgatcattgggctgggccagcctctctgtcctcattttcccctctgcaaagaaggggtgttgggcgtccctacttctcgcgccagccccggggcctctatcctggcgggaagggcaggccgacccggcagactgcggcctctcgggagggaagaaggtgtcagacgcgcggagcaaccataaatagcccccctttcccagaagacggcacggggttcaagactcaggcgccgcatactcagaatgagagcagagactcccgccaggaaaaaaaggcacttaggggatctgctcattagcatgaaatgcaaatgagcccgcccggcctcatttacacaactctgtgcatggattcggcgaaagggcaaccagggagacgacggcgcagcagccactctgccacttcccccatcccctccccccatcggccggggcgggaactgagacgaccccaaccctctgcggtggcgggaggtgcgcgggggctgcgtgggtggtgcagccttaggagagtgaacaacgcccaggggtgatggcctcagcaaagtgaggggtggtgatggaggtcatccgacccatcccgccgcctctccgcagtggcgcaagcgccccaaaatctccggagagggaactgactgacccactaggttccgccgtgtctacctctcgcagatgttggggaagtgcttcccggcgtctaatcctcgctgttcccccctccaccggcgcccagcacacccgcggcgctccgctcccgggtacccacagctttctggagtggcgccggcggcaggagagagctagagccgactgagccccagaactcggggaggtaggcggggcaagggccggggtctgcgcgtgcgtgtgcacgcgtggaaagcacaaacccacgagggcccgctgccggtagggttaaggtgagtgagtgaaggcggcagacccgcgaagttccagttccgcggacactccttccctaagccacatagggacttaagagaaactgaggcacgaagttggggggtggcggtggtggggactttgaaggtcgagtcgataaagcccagctctgtgcttccgccccctcccacacactcgagacccccacaggttccttcttaggggtcctcgctctgctccgcagcccctcctggggatccgggctctgcggtccagcgcgacctgcctggggccacgtgttcaagcacgaagcccctgcgtggagtccacgcccttcaaaaggtccctaggggcaaagggatgaagcccaggagcgtcaatgtgaggtcaggtccagcgggttagggttacgaggtcagggtcgaagtctcagaattgactcgggagtatgaccaataagcccaagagatttgtggaggccacgcccagaccatgcctaccctagcctttctcgagctccgcccgtttctccaagactgggcccctccagcctgaagccccacccccaggacatccagctccgctccttcccttccccagtcccgcagccaagctcaactccagggtgggagattaaccaggtggagacctgggatttcgctctgggaccccctggtgacaaccctcacccccgtgccgcctgtctcctttcttccccaggcccgcccagagctgagctccgtcctccggctgctgcccaaatcaggggtcgtggacaaaggatgcctggggcctgcggccctacgccaggaccccgcgccgaatactctgattcttcgggctccctccaagggagtcccaaagaccccaatggccaataggaaagtgggttcggtctgggcagcagtctgattggctccagccttcgggagcggacccaggggcaaggggaggggagaggggcggtcctgggttttggggtgggaatcggattccagctgtggttctctccctgcgctcccgcccgcactgccacggcggacggccaatgggcgcgcggctcggggccggcggcgtccggcgattggctgcggggctgtctgggggcggggccgaggcttgaagttgaagtgagggatccagctgtggtgtgcgcggggctcctcgccgccgctttcgctcgctcgctccgcgtctcggccggaggaggaggctgtggcgccggcgacagctacggcagcggcagccaccgcggcggctgcggcggcggcatctccgcctccactcccgcccgggactgccccccactgtctccccgcccctcccggacagtgagcccgcggcggggcgggggaaggagccgcccccaccccctccaagcccacccctaaagagatccctcctcccctcccccgccgcctggcgcggagccgggacgatgctgaccccttagatccggctccagctgcgccgcgggaagagggggcgcccctccccggacccccgccctccgccgctgccccccttttcgttcgccctctcggggcggcttcgccgaaggtagcgccgaatccggcaaccggagcctgggcgcgaagcgaagaagccggaacaaagtgagggggagccggccggctggcccgggaagccccaggggcgcaggggaagcgggactcgcgccgggcggggtttccctgcgccccggcgccccgcgggcagcatgcccctgcgggcagggggagctgggctgaactggccctcccgggggctcagcttgcgccctagagcccaccagatgtgcccccgccggggcccccgggttgcgtgaggacacctcctctgaggggcgccgcttgcccctctccggatcgcccggggccccggctggccagaggatggacgaggaggaggatggagcgggcgccgaggagtcgggacagccccggagcttcatgcggctcaacgacctgtcgggggccgggggcggccggggccggggtcagcagaaaaggacccgggcagcgcggactccgaggcggaggggctgccgtacccggcgctggccccggtggttttcttctacttgagccaggacagccgcccgcggagctggtgtctccgcacggtctgtaacccatatccttcggggcacgacggccaggcgcggggtcagaagggggacgggccgcaccgccgggggtcgggggggaagaagacccaccgccaggtgagtcgaagtgagcccggagggtaggcggatggggggggggctgccagggaggggagggggcaccagagtgggagcggagacgcgagcaggtctcgtcggtaacccgggcttaccccacctgcgtacacacacctcagtcttcctgggttgggggggtggggatccaggccaggagaagagagctgtgccccgctggctcgcagctggacgccctccagatgtggtcaggggagggtcgtcatcctccagatgtgggaagcttcgggagcctgggagctgtactctgcccgcgccggttagcgagctgggtttggtttccgagtttggtggggggtgggtgggggcggtggggaggaagctgcggggacggaggaggggggaccgcaatctcctgggtttccctccttcccccgccccaaagtttgcggcggattctagggtctgatcccccaacctggtccttgaggctgaggtttttactgacctagaaggagatgttggggggcggggaccaggtcctggcccacctcaccccccacctcgcgggttggaggcacaacaaggagattccggcggcggctgatgtcaggggcgcagaatgagaacaagatgtggtggaggggagctgtctgcccccggagctgggagtggagcccctttccgctagagcccagtgccgcgggtgcctcctacccgatctccattcgatgcagggtgcttaagattgggttggggagttttatgctggatttttcttgtggagggaaagactgtgtcaagagcttttttagcaagtgggggatggggttaagctggtccaggttactcctcccctttcacaaataaagagtgctcctgcagaccaggtatgggggactgcaggcccgcgaaagtcttgaggggacagtaatactgtcagtgtgttcactaaggaggactcgggtccaccaccccagcgtagactccgcagataggtttggggaatgcaagccccacattccagggagatggatttagcactgctccctgtctgcccaggctggagtggtaggggagaccccagcccagtcagaccctagctcaaagcgccacttgacagacgcctggccccaagctccctggcgggtcctgccaccgggggaaggaaaggtggaggggaggtgttgctgccatctcaggtctggacagcttctctgggctccttccttccagctcagaggttcttatagacccagggtgggagaccccaggtctcccttgtagcccctgtgagcctagcagggactctgctttggggaaggggggtggaaggttggtgccgccctcactctctgcagctctgctgcctctagtgcgcaaagcagggatgagcttgtggcccccccacccccatcctctacaccttgtgggtctttaggaagctcccctcatcacatcctcttctcatccactgccccttcttcctttctctctgagctgcagaaagagaggtgcaggcctcagaggtctgtgttcttgctgaataggcacaatcttgaggtttgagcccccagccccaggcccctttctcccaggcagggatggagatggagaactgatatggctggaaaggatgggttccgagcaactctcctctctgcccctaatcatttaccccttccacgaatgggaaaaagcatcaacctctatgtcctccttctcaagggtcccaggggaggtagagagagctcttctctcccctctccctgaaaacagacctctaggctagcatctcttctcgcctgccctatctccaggtgctagtggagggtctggaggcagactccttcactgagtggtctggacgggggcaagtgttgaggcctggcatgggggaggagaggtgggaggacagcactcaccttgggagttggggagcagcttcccccaggggagtggtagttgggtgtgtggcatcagcattactaggtctggagaagcctgggttggctgaggatgggttgagaacaattttttggcaggggactgcctaagctgtgcccctcaccactgccatcctacccaagtaccaagagacacctgtatttttgctgccagaggggctctgaactgcctccagggcctccctctttctctttgtggtatctgtgactccccacaggcttcaggagggtccctgtacgcctctgagccggagggacataaggacactcccctccacccccaactaactgaagctagttaggcttttcttggtacattctgcttcttggcctctcctttttaagggaccaggtttcctagagaggagatctagacccaggtaggaagtgtgtgtgtgtgtgtgtgtgtgtgtgtgtgtgtgtgtgtgtgtgtgtgttgcaagggaggacagcaaaaggctcagaagtgcaagctttggtgtggagagcaggggtactggcagacagtcacccctgcctcagatcagaggggagcatgctggcctttccagtatgtgttcctgcaagtgtgagggagcgcgctcccctctcggggaggagttcctccgcattccctctctggctgttgtgtcacatctggaagtttgtgtaggagtttctccaagctcagagcccagcacagctttttctcatttggaaatcacaggctggcatttgggatgccgagagagggggagtgggaggggggccagagggggaagaggggagcctgccaggagtcgggggaggagaggggggggaggcctgaacggcaggagccctaatggcttccagaagtgagtgtgagtgagtgactgtgcgtcactctgtgtgtctgagtgtgtccctctagaggggtgggggcacaggagtttctggagccttccttgccacactgtcccaatgccccaagtctgcctatttctcttacctagggagaattctccatttctgtcctcagaggaaatggtggggggagtgttcttcctgtctcttcatcaattccctcctccaatttaatttccaaaccctaagctcaccagaggagattctggggagaagggctggggctggagaattgaatgggattgagggggggccagatcaccccttggcatgctttctgccccaggcccactttccttctgggtcacacacacattccttcccacccgctctgctccaccgctctgctgggggactccccatcacccgtagtgccagttggagccattcctgggattacccccaccacacagccccccccaccctcgcctgctcccgcccagcactcaccccgccctgcctgcctcagccaggatggcgacagacacaactgctcacacgcagacatgcgcacgcgcgcgcacacacacacgcacacacacacacagagtcacagacgtttgaatcagatttctggcctatttccccttccaaagattccagcgggccgtctctcttgtgtctctgtgtctcatgtctctgtctctgggtggagccggctgcctttctgtgagcttcagttttcaattcagctggaagcctctctccccctacacccatgcactgaagcgtggtgaggggggaaccacagggaaataggcttgtggggtgaggggggggggttctgctgggggaatccccctttgagctttggagcagggcggagcccctacatcccatgttaccctaggggttgccgaatccgatagacaccaggagcctctctgtgggatgggtgaggcaaggacctatccccctacctcctcatttactagaaggccaggactcctgggtccaggcccattttctcctcaacgttccttagtctcacatttccaggctcctaggtgggaatggggccgctggagggcctgcttgccttctcagcccatgcccagagcccctgtgcccctagaggtgtcccagccacccccctcctctccctactttcctcacccttgcggctgccaggctaagcaagggctctatctagataaagccccacacagaggactcatttgtggagataacatgctctagttctctctcccaggagggaggaaaggaggagggatggaagtggggttcctctctctgccgtttcctttttctctgcttttgatggtgggttgtggggagaagaaagatcctcccctctcctaccccctctttgggatccactccagcccggacagtcaccatagcaacagtagacatgtgactgcacaggtctctcatagtcactatggcaaccagtgtcccccgttcccttggttaccatggggatctgtcacatggttttcccccaacctgataacctgtgggtctccctgattctcctcccctgcataaggacaagacaacagcctcagtcaggggagatcatgtgagaggggtctttttaattaccatgacaacaaatccacaccacctggtgacacatcctcctgtcgttatggcaacagaagaacatcacacagtgacatactgccatgttcccaaggaaacaagccctactctgagaagggtgaaagacccccccccccattaattattcctctattcagagtgtcccaaattgtcgtgtgccttggtctcttccctgtccgtttatgcttacgtgtcgtggaaggagagctgtacagggtgggcaggatgttacttggaagcaggctgaattgccaagggacccttaagaaggggctgacatgatcaagagctgtgcatgaggttattcgggggcaggctttgcctgtaagaggcctccagtctgagcctgggtaaggtggggacagaaagaggggcaactcctctgtgaggtcacttctgtaccttcccccagttataagcagttcacctctgtcaagggaaacaaggcaggaagacctgaatggggacacacatctggcttctaggcagggagacttattgattggttgattcgttcattcattcattcagtcttcccaggtattgatcatctgctccgtgccaggcactacagcaagctccgtaggggatctaaagacgtatcagaatgcccctgcctgtcaggagccccagctcagcaggggaggtcgacaagtgcacagattactaacacggtggaactctgccattagaggggtccaagcagatgtcctgggagcccctcttcctcagagatctactgcctccacacagagacattcactcactggggctccttccagacccccctttccctgcagaggagaggaggggacctgcatggggaaagcagaccagttcttgagggtaactgtgtctttccctttccaaatgatggctcccttcctgtccccctttttccagggtgacccctggctgaaccccattctggggagagatccactgcactccggctctactcagaaaaacaattccatggaaacagagcactttttatttcctccctgtcatctgcctacccccaaaaacctagaacttttttcttaaaccctcttattcttgtgagggggtgggggttagggaaactgcagtgcattaggactctcggggtaccacggacaggtggcgagcaggcatgtgagtctaggggagaagggcctgggtggtggagaagagacaggggagggctgtcaggggtttgagggattcatgggctatgggggagggcatgtggcttgggagtcagaacagagatgggctatggctgggaccagctgggaggaaggtccataggttcctgaacattcctgctggcctcttcatgcctggccaaagccttctcattccagaagcaagattccacctgctctgggccctacagagtctggcttggtgggtcatgccaggagctgccacaatacctcccccatccccattccccagggggtctctggtctcctttccccaatctcctgctctctgatcttttctagcctctttactcttccccacccttctcatattttccttaaagaaaataggatacttggtcatttaaccgtgagtccagtgcctggaaccttctaaggtccggaggccgttttgtacattctcctgctgatgggctggaaatgagtcactccatagaatccactgtatggaaagacccagggtttagaaagaacccctctctcctgcttgctgttttggctggtctgggctggaagccacaagcaggtgtgatggcggcaatggcctcttgggggagggggtagacattgtccactctgcacggcttgggagctatgcccagcatggtgcctgacacataatgggtcctcaatatttaaatgtgtgaatatgcctagtggtcatttgagggtgttgagaggttgggaggctggtggtggaagagggagccccgggctctggtgctgtagcaggggggactgcagctgtggacgtctgccttacacctagtgccagggcggtcatgacaggcagttctgcctgcctgagcagctatggtgtgcagaggaaactatcatatatcaggagcttggaaaccaccgtctcatcctgccttctcgggtgaccttcagcacatgacttcggcatttctgggcctcaacttcctcgagttctggggaagaaaatgatctaccccagatatttcacagggctgttgtgagcatcaactgtggcattgtgtgaaagtgcttggtaaactgtaaggcaggcataatccgactttaggtttgtataacacattcacatacagtatctcatttgcttctcacatctaccctgtgaggtagggagaataggattcagattctgcagcaaactcatggtgtctggcatttccacaggcatgatcgatttattccccaaatggcttgtgcaaatagtcagggtatttgtggcttgtcttcctttacagatgaggaagctgggtccagagaggtgagatgaccaaggtgggactccccttctctgatgaggagtctggggctgggggctggtctgcgtgtatgtcagggccctggcaccacacctgcttagcctcagatggagccaggaggtaaacgaggaggaggtgttagggcggggtcggggggccggcctcagctccagccttggccagctgtttccttgactgccagtacc

SEQ ID NO: 4 - DNA, 3720 bp, Homo Sapiens
tgcagttgtctatcaaaattttacatatactttggcacacaattacactcgttggaatttatctcacagacacattcacatttatatagtcaaggatgttgactccaacaacattggtataagtaaaaagttggaaactgcctacatgctcatggataggggataaatcgactaactcaaggtcctcccttacaatggagtactatacagccttgaaaaagaatgacaagatctttatgtcaggacatggcacaatctctaagttatttcaagtgaaaaaataataataataataatattgcagaacaatgtgtatggttggatatacataaattcttctgaaagaatacccaagaaacttaaatgtggctacctcaggagctaggaatgaggtaggtggagaggagggacttttacttttcaatttagaatataccctgttgtgctagttgactttcctcctactgttaacaagtattacagtcctttttaatttaaattatttttcctagcacaaatttaaaaaaaaaaaacttaaaatggaaaaacacacaggcgtgagcaaaagaaatgaatggcaataatctctgtggtttactgagtgcgcctggacatttatgtgctctcagtttctctccacaggaaatgcacaggtgagaaactgacgttaagggggactgagtgtcaagctagttagtggcagagggcagattcaaacccaacacggtcctcccctgctgcccctcggcctctgcctccaggtgggaagcgcatctaccggacggtcggcccggtgaggcgcagcgccccagactggcgcatccgcggccccagcgctccacgcctggggagcgcgcgcgcacgcagcggcgcgagcctggcggcggcggcgacaacaacaacgtcacagctcgagctttccttttcggagtccccggcacacatcctgtgtccatgtttgggcatttacgtcacggcggcagggccggggcctcccaaaatggcagtggcccggggagtcggaagcccggagccagcgccgccgcagctatataagtgggggggctgtgggctgggggagcccggcagcgctttggagaggcgaggagccgccgcccgaggccggtgcgggcgagcgagggcgccgcggctccccgactcctttcccagaggtgagtgcccgaagccaggagcccggcgcccataggtctgtgcgctgcggggaacccctaccgccagcctccccgccacccgcgcgcccccaagcccagcgggcgaggccccgggcgccccacagccggcgccgcgccatgctccaccttagcgagttttccgaacccgacgcgctcctcgtcaagtccactgaaggctgttgcgccgaacccagcgctgaattgccccggctgcctgccagggacgctcccgcggccaccggctaccctggaggtaaggagggcgagcaggggtgctcagacgacgacggcgcagcgcgggggcgcaccatacctgagaaccaggagggactgggacattggagctatgagaataggggcgatgggaagcttaggagtcctggggtgcgcacccccattcccacccacactgggccgccagcgcctccgcaggaacctgtgcggttatcggagcgcccttttgcctgtgcacgtgtgttttgcgtgtgcatgtttctatgtgctccttgggacgtatgcgggcccctgctgaatcagaatgtgcaaaaggcactttgtgtatatccgtgggcaccaagagttttgtaggtaggggctgtggactcaggtgcaccctttgatgtgcccagagctgattcctgctccctcctcagcaggcgacttcttgagctgggctttgaacagctgcggcgcaagtggggacttagccgactcctgcttcctggaggggcctgcgcccacaccccctcccggcctcagctacagcggtagcttcttcattcaggcagtgcccgaacacccgcacgacccggaggcactcttcaacctcatgtcgggcgtcttaggcctggcacccttccccggtccagaggcagcagcgtccagatccccgctggatgccccttttcctgcggggtccgatgccttgctgccgggtccgccggacctttactccccggatctgggcgctgcccctttcccagaggcgttctgggaggcctcgccttgcgcgggtgccccctcgcagtgcctgtatgagcctcagctctccccgcccgacgtcaagcccggcctccggcggcctcccgcctcgccagcgctggacgctgtctctgccttcaagggtccctacgcgccctgggagctgctttctgtgggggccccagggaactgtgggtcacagggagactaccaggccgccccggaggctcgttttcccgtaatagggaccaagattgaggacttgctgtccatcagctgccctgcggaactgccggccgtcccagccaacagactctatcccagcggggcctatgacgctttcccgctggccccgggtgacttaggggagggggctgagggcctccctgggctcctgacccctcctagtggggagggagggagtagcggcgacggcggagagtttctggccagtacgcagcctcagctttccccgctgggccttcgcagcgccgccgcggcggacttccctaaacctctggtggcggacatccctggaagcagtggcgtggctgcaccacccgtgccgccgccgccgcccacccctttcccccaggccaaggcgcgacgcaaggggcgccgcggcggcaaatgcagcacgcgctgcttctgcccgcggccgcacgccaaggccttcgcttgcccggtggagagttgtgtgcggagctttgcgcgctccgacgagctcaatcgccacctgcgcatccacacgggccacaaacccttccagtgccgcatctgcctccgcaacttcagccgcagcgaccacctcaccagccacgtgcgcacccacaccggcgagaagccttttgcttgcgacgtgtgcggccgccgcttcgcgcgcagcgatgagaagaaacggcacagcaaggtgcacctcaagcagaaggcgcgcgccgaggagcggctcaagggcctcggcttttactcgctgggcctctccttcgcttctctctgagcaagagatgggtttatgggttggggcgccgccgttcggcgcgcacgagttccgggccgttcccctccccgctcttcttccaactcctcctcgcacgcccgagggccggcctccgtcccgcttccagtttccttgaagcgcccgccgcacacgccctattcagcaccagctcgccggacagttcccgcggtccaggcgctgtcacccttgtcagccgcgctttgggggaagtcttctgagaccacccagtgaataggcactaccctgggattcaagacagtcttttgtaactgcacacgccccacgccttcctctataacccccagagacaggctggggcaggccaaggcggtctcgcgcgggactttgtacagcagtgtcttatccagcagccgattggatgtaacgttttgctttgggttttttttccttttgttgttgttaatttttgtaaagcagacgctactctcaagcagttgacaaaactgtttatttttgcaattaaaattattgtgctaaaagcttactgaatctgccatgtaagctcct

SEQ ID NO: 5 - DNA, 8759 bp, Homo Sapiens
tagcctggaagagggcagccaggggagaagttagggctggagctatgagaaaggataagatgagatgatggcttcaacattgaggacagaaagaatattgagatgagaaagtagtccattataagcatctatgcaaaggaaatagcagatgtccacaaatcagcagaggcaacaactctgaaagtttattcataagcccctcttttcatctccaatccagttcaaatgtaattatttaaattgttcttcactctccttcctggatcatgaatgagctccttaaatgcagggtccacagtgtcctattcatcagtgaattccaagtgcctagcacagagcctggcaaatagtaaatgcttaacaaatattcgttcagtgcatgaattggagtgattctctactttgctcataagttgaaaaaaggtttattacatacctaaatatgctgaaatcacagggcatttggcaaccccccaaaaccaaaactcccagtttggaaacagaattttaattctgtgaaaataaaatccattcatttattcaaaaaatatttattaaacaatgaccatgtcccacaccaggctgagtcctaaggattcaatgatgaacaaaaaccaacatgattcctgctcttaggaaacatacagttcagtgaggaaaacagattgtgagaagtcctccaacaaatactgggtgctattaaaatatattaaaaggtgagtgggtgagggacttgagctagcctaggtggttcaggaagtcttcctggatgtgctgatatgcataggcattaactagataaatagagagaaggatgaaccaacattgcaggtagagggaacagaatatgcaaaggcaggaaggattatggagtcgttggaggacctgaataaaggccagtgtaagtggatctcagaaaacaggaggaaaggtgtatgagatgagatcagagaggcagatcatgtggggtatggttaatgttttggacttttctattaagagcaatggggagacagtgacaggacttaaacggggaaataatatgaccagattaaactttctaaaaaaccctctatgcaaatatatattgagagttaattattgacaaagattcaaaggcaacaaagtggagagagaatagtattttcaaaaaatggtgccaaaacaataggacatctatattaaaagttgggtatctgtctacaaaacttaattcaaaatggatcacagacctaaatgtaaaactgaaagctatacaacttctggaagaaaacacagatgggaatctgtgtgatcttgagtttgaaaatgatttattatatctgacaccataatccgtaagttaacataattcataagtgaacaaagtgatgaactggacttcatcagaatttaaaatgtttgtgcttcaaaagacactggtatgataatgaagacaaactacagataagatattgttgaatcatatttctgataaaggaattgtgctcagaatacataactctaaaacccccataataaattacaagtagcccaattaaaaaaaaaaaaagagaaaaaatttacagtcttcatcaaagaaagtatacaattgtaaaataagcacatgaaaaatgctctgcatctttattcatgggagaaataaaaattaaatgggaaagacacctctaattagaatactaaaattaaaaagactgaccataccaagtattggtgaagtggaaatgtaaaatgatacaatcacttaggaagatgatttggaagtttcttacaaaagtaggtgtatacctaccctgtgactcacccattccatggctaagtatttacctgagagaaatgaaagaatacatccatacaaagatgtttatacaaatatttatagcagttttatttgtagtagccccaaactgaaaagaacccaaatgtccatcaaaagtgaatggataaacaaagcgtggtacagcaatgcaatagaatactacttagcaataaagaagaatgagctagtgatatacataacagcttaaatgtacatcaaaggcattgtgctcagtgaaagatgcaagtaaaaaaaaaaaagagtacatgctgtatagttccattgacataaaactctggaaagtgaaaaacagtctatactgacagaaagcagatcattggttgcctgaggaggaggagtataggagaggtggagggaaaatgtacaaagtggcacaataaaaacttttggaatcatagatatattcactatcttgattgagtgatgatttcatgagtgcacgcgtgtgtcaaaaatgatcaatttatgcaactttaaatatgtgcagtttattgtatatatcaattatacctcagtacggctattaaaaagaaaccctctggctgcacaatgcagaactgattctaggaaagagtggagggaggatgaccatttacagtgctccaggtggaagagaacggtgccttctggaagtgaactaggttggcaacaacagagatgaaataaatgggcagatgtgtgagatacttaggaaataaaacccgatggtcaccattttccaaaggtcagctcatcctggctttccagagcaaagagctagggaagactttattaataaatccctcttgaagttgcagaggaagcttatagcagaaacttactctcaacctgactaatctgagagaacacctctggttccatttgattactaaaaaactgcaaagaacaggaggagaaagaagaagaaagctggtacaaacagtgaacttatataatattaatcaataattgtctcttgttcttaaaagcaatgggaagaaaatgagatttgagctggaagatcagagttcaaaatccaaataaagtatatggccctaatatgcttatagtagttaacctttcctgataatgatataattgttgacagcaccatctttaaaaataaaaataacatagtaatccttcagatttgtagaatgctttcctgtttacaagtttgttctatacacattatgtcttttaaatgacacactagccttctgagggtaacttatattggcaacagttttcagatgtggaaactgtgaagacaatgttggtgatgtggaagcaacataaactttggagtctttcagacccaggtttgaatgtcagactgctttttattcagagtaacttcagagcattatttctcaccttaattttttttcaggcctctttgtgtctatgtgtcctcttcactcctgtccattgttcattcagtgatttttgcaccttccttcactgttagtgtgtagacacatagttctcctggctctgagacctatgttaattccattctaccatcctgccagcccactcaattcctattgagcaatgctagttgaaagttgtggtgggattaaatgttgcaatgagtattcaaatgaggttgaagtatctacgcattctacttacatatggtgaggtatattcaaggaaggctgtagccattaaaatctcaggaaataatttttcacctcctcaggtgaaagggtcttcaggcctttgtgttctggaaggttcatttatagccatttcccaaatgacaatgcgattgatgagtctagagtctagctcaaatagcaatggactggaagactagtttaggttttactaatgtggaacatagaacaaattatgtccttgtttcagcctgttcatctgtgaaatagagcctatcatatccagtcttccttgcctttaggtttgagttaccttctttggtcaaggtaagtaaatgcctatgatgtttggctgtgcacaagataaagctacaacaaagctacaacccatcttttctctgtagaagactgcaaaaagcaaaagagacccaggcaaaaatctcggaatgacttttggaacagagagcctccccagaatcagaagtcaaaggaatttaaaacatagggaggcccagggtctctactgacataaaggaaagatgttttccttataggtttacgtttacattttctctctctttccattcccacttgcatctccacctttacacagggcttatgggacctcctccacaaaagagcagttgcagtaacccacatcatcctctacgcctggctgtccatcaagaggcgaaaagcagccctatataggttctatccttggatagttccagttgtaaagtttaaaatatgcgaaggcaacttggaaaagcaagcggctgcatacaaagcaaacgtttacagagctctggacaaaattgagcgcctatgtgtacatggcaagtgtttttagtgtttgtgtgtttacctgcttgtctgggtgattttgcctttgagagtctggatgagaaatgcatggttaaaggcaattccagacaggaagaaaggcagagaagagggtagaaatgacctctgattcttggggctgagggttcctagagcaaatggcacaatgccacgaggcccgatctatccctatgacggaatctaaggtttcagcaagtatctgctggcttggtcatggcttgctcctcagtttgtaggagactctcccactctcccatctgcgcgctcttatcagtcctgaaaagaacccctggcagccaggagcaggtattcctatcgtccttttcctccctccctcgcctccaccctgttggttttttagattgggctttggaaccaaatttggtgagtgctggcctccaggaaatctggagccctggcgcctaaaccttggtttaggaaagcaggagctattcaggaagcaggggtcctccagggctagagctagcctctcctgccctcgcccacgctgcgccagcacttgtttctccaaagccactaggcaggcgttagcgcgcggtgaggggaggggagaaaaggaaaggggaggggagggaaaaggaggtgggaaggcaaggaggccggcccggtgggggcgggacccgactcgcaaactgttgcatttgctctccacctcccagcgccccctccgagatcccggggagccagcttgctgggagagcgggacggtccggagcaagcccagaggcagaggaggcgacagagggaaaaagggccgagctagccgctccagtgctgtacaggagccgaagggacgcaccacgccagccccagcccggctccagcgacagccaacgcctcttgcagcgcggcggcttcgaagccgccgcccggagctgccctttcctcttcggtgaagtttttaaaagctgctaaagactcggaggaagcaaggaaagtgcctggtaggactgacggctgcctttgtcctcctcctctccaccccgcctccccccaccctgccttccccccctcccccgtcttctctcccgcagctgcctcagtcggctactctcagccaacccccctcaccacccttctccccacccgcccccccgcccccgtcggcccagcgctgccagcccgagtttgcagagaggtaactccctttggctgcgagcgggcgagctagctgcacattgcaaagaaggctcttaggagccaggcgactggggagcggcttcagcactgcagccacgacccgcctggttaggctgcacgcggagagaaccctctgttttcccccactctctctccacctcctcctgccttccccaccccgagtgcggagccagagatcaaaagatgaaaaggcagtcaggtcttcagtagccaaaaaacaaaacaaacaaaaacaaaaaagccgaaataaaagaaaaagataataactcagttcttatttgcacctacttcagtggacactgaatttggaaggtggaggattttgtttttttcttttaagatctgggcatcttttgaatctacccttcaagtattaagagacagactgtgagcctagcagggcagatcttgtccaccgtgtgtcttcttctgcacgagactttgaggctgtcagagcgctttttgcgtggttgctcccgcaagtttccttctctggagcttcccgcaggtgggcagctagctgcagcgactaccgcatcatcacagcctgttgaactcttctgagcaagagaaggggaggcggggtaagggaagtaggtggaagattcagccaagctcaaggatggaagtgcagttagggctgggaagggtctaccctcggccgccgtccaagacctaccgaggagctttccagaatctgttccagagcgtgcgcgaagtgatccagaacccgggccccaggcacccagaggccgcgagcgcagcacctcccggcgccagtttgctgctgctgcagcagcagcagcagcagcagcagcagcagcagcagcagcagcagcagcagcagcagcagcagcagcaagagactagccccaggcagcagcagcagcagcagggtgaggatggttctccccaagcccatcgtagaggccccacaggctacctggtcctggatgaggaacagcaaccttcacagccgcagtcggccctggagtgccaccccgagagaggttgcgtcccagagcctggagccgccgtggccgccagcaaggggctgccgcagcagctgccagcacctccggacgaggatgactcagctgccccatccacgttgtccctgctgggccccactttccccggcttaagcagctgctccgctgaccttaaagacatcctgagcgaggccagcaccatgcaactccttcagcaacagcagcaggaagcagtatccgaaggcagcagcagcgggagagcgagggaggcctcgggggctcccacttcctccaaggacaattacttagggggcacttcgaccatttctgacaacgccaaggagttgtgtaaggcagtgtcggtgtccatgggcctgggtgtggaggcgttggagcatctgagtccaggggaacagcttcggggggattgcatgtacgccccacttttgggagttccacccgctgtgcgtcccactccttgtgccccattggccgaatgcaaaggttctctgctagacgacagcgcaggcaagagcactgaagatactgctgagtattcccctttcaagggaggttacaccaaagggctagaaggcgagagcctaggctgctctggcagcgctgcagcagggagctccgggacacttgaactgccgtctaccctgtctctctacaagtccggagcactggacgaggcagctgcgtaccagagtcgcgactactacaactttccactggctctggccggaccgccgccccctccgccgcctccccatccccacgctcgcatcaagctggagaacccgctggactacggcagcgcctgggcggctgcggcggcgcagtgccgctatggggacctggcgagcctgcatggcgcgggtgcagcgggacccggttctgggtcaccctcagccgccgcttcctcatcctggcacactctcttcacagccgaagaaggccagttgtatggaccgtgtggtggtggtgggggtggtggcggcggcggcggcggcggcggcggcggcggcggcggcggcggcggcggcgaggcgggagctgtagccccctacggctacactcggccccctcaggggctggcgggccaggaaagcgacttcaccgcacctgatgtgtggtaccctggcggcatggtgagcagagtgccctatcccagtcccacttgtgtcaaaagcgaaatgggcccctggatggatagctactccggaccttacggggacatgcggtaagtttttccttccagaaatgtcgcctttcggcccagggcagagtcactctgtgttctggggtatctagcggctcctacctgcgcgaacactcagattgcccctgggagagctcagcagggtaaacctagagctctcccgtggactcccggcctgccagaggtttaacctgagctctcctaatttctgctgcgtgccctgggtgctgattcctgccctcccagattcttcaactcccccaaccgccccaaattctcactacctcctggtactcgaggtcccaaacagaaatcctattgcacgggccaccttcagagataaagctcccaagccctccactcttcctttcctcctgtcctcaaagtctgagaacctcaacaggaatttgggcaatttctcctcttcaggtctgttaggatttcactttcagcctgcgcagattagagtcaaaaagaccggcccaatagcttctcagcgggtatcctccagagaggtaaagtgaaattctcggttagggaaagaaagtggtctctgggtgctgaggtctgctgtgtgaaagggtgaacttctttctcctgaagcaactggggacttgctccagggctggaggtcagtagagataatccaaaccgtcatgtttagagtaggcagaggggcaactttcttggtaaagacttcacaggatttgcactcacagtttctcaacgttggttgactatgttgaaagtagttgcttgggtcggttttctcttgtaaagtgtttattttctctgtggattataacagatccacagccccctacttcaggtttgcatcagatctataaagaggagaatattcttttaatgtacaatttaattaggcttgactctgacttacaaaactgttggaaaacatttttttgtaaagcatttcctgctatttcagtgtgctccaaaatctccactggggagggtggagtgaggttttttattatattcctttatttttaggacatgtttgcattttagaatatgtgcagttagct

SEQ ID NO: 6 - DNA, 8404 bp, Homo Sapiens
aggaagctaaaaaccttgaaaaaaggttagaggaattgctacctaaaataagcagtttagagaagaacataaatgacctgatggagctgaaaaacacagcacaagaacttcgtgaagcatacacaagtatcaacagccaaagcagaagaaaggatatcagagattgaagatcacctttatgaaataaagtgtgaagacaagattagaggaaaaagaatgaaaagaaacgaacaaagcctccaagaaataggggactatgtgaaaagaccaaacctatgtttgattgtccctgtacctgaaagtgacagggagaattgaaccaagttggaaaacactcttcaggatattatccaggagaatttccccaacctagcacgacaggccaacattccaattcaggaaatacagagaacaccacaaagatactcctcaagaagagcaaccccaagacacataatcgtcagattcaccaaggttgaaatgaagccaaaaatgttaaaagcagccagagagaaagtcgggttacctacaaagggaagcccatcagactaatagtggatctctctgcaaaaaccctacaggccataaaagatgggggccaatattcaacattcttaaagaaaggaattttcaacccagaattttgtatccagccaaactaagctttataagtgaatgataaataaaatccttcacagataagcaaatgttgagagattttgtcaccaccaggcctgcattacaagagctcctgaaggaagcactaaatatggaaaggaaaaattggtcccagccactgcaaaaacataccaaattgtaaagaccattgacactatgaagaaactaatgggcatcaactaatgggcaaactaactggctagcatcataatgacaggatcagattcacatataacaatattaaccttaaaagtaaacgggctaagtgccacaattaaaagacacagactggcaagttggataaagagtcaagacccatcagtgtgctgtattcagcagactcatctcacatgcaaagacacgtgctctaaataagggaatggaggaagatttaccacagcaatggaaagcaaaaaaaaaaaaaagcaggggatgcaatcctagtctctgataaaacagactttaaaccaacgtagatcagaaaaagacaagaagggcattacatgatggtatagggatcaatgcaacatgaagagctacctatcctaagtatgtatgcacccaatacaggagctaccagattcataaagcgagtccttggagaggaagaaagagacttagactcccacgcaataatagtgggagactttaacaccccgctgtcaatatttgacagatcaatgagacagagtaattaacaaggataatcaggacttcaagtcagttttgcaccattcagactaaatagacatattcaatatatatatatatatatatatatatatatatattttttgagatggggtcttgctcttgtcgcataggctgaagtgcagtggcatgatctcagctcactgcaacctctgcctcctgggttcaagtgattctcctgcctcagcctccagagtagctgggattacaggcacctgccaccacactcagctaatttcgtatttttggtagagatgtggtttcaccatgtttgccagcctggtctcaaactcctgacctcaggtgatccacccgccttggcctcccaaactgctgggattacaggcgtgagccaccgtacctggtctagactctgccgaaattctaatacttctttggtaatgcaacagaaaactaaagattttgatggtgaactcaattgcttctgagttgtgtggatgaaaatatattttattattttttccttcaacttttaagctcccaggtatatgtgtaggatgtgcaggtttgttacacaggtaaatgtgtgctatggtggtgtgctgcacagatcaacccatcaccatggtattaagcccagcatccattagctctcctgatgctctccctctccccacccttccccgctacaggccccagtgtgtgttgttccccttcctgggtctattttatggtatgtatgtgtgtatgtgtgtgtgtgtgtgtgtgtgtgtgtgtgtgtgtgtatctatttatgtgtatatattatgatatatacaccacacttttttcaaactattattttaggtttagggatacatgtgcaagtttgttatataggtaaactgtgtgtctctggggtttggtgtgtacagattttttcaccacccaggtaacaagtgtagtacctgataggtagttttttgatcttctgtcctctcaccctacaccctcaagtaatcccccagtgtgtgttgttcccctcttcatgtccatgtgttctcattgtttagctcccacttataagtgagaacatgcagtgtttggttttctgttcctgcgttagtttgctgaggataaaggcttctggctccatccatgttcctgcaaaggacatgatctcattcctttttatggctgcaggaaaatatattttacatactagtgaacatagttaaattaatccatggtcaagacatatattcttttgtaaattgagaaatctctttatcataattgtaatatggtaataaataaatctagattacataaatgtaatctagatgttgataaactggttttaaataaagcaagtgatatctacgtatgaagagagtttacttcagttcctagaactttccttcactttcctgccatccctacttttagtaagcaagcatttactgtgtgtgtaacactgtgctaggtactaaggcaatgatgatacccaagatttggtctctatcctgaagataagcacaggagaaacattatcagtcatgatgctttctgttgcaaacaagtgaaaacctcagctcagcttaggtcagctccagggctggccaaatcagaggctcatttataacactgaggatccagattcttttgaaattcctcctgcaccaatatcagcatttctaccttctctgtagggtggcttgcctcacgttacaatggctgcagcaatcagaagtgtcacatcctcagtaatacttaatattattactattatttaataatatttagaactgtgccatccctgtttcaatttatcaggctcccagcagactactccttatctttcaaatgtcaaaactgcatcctgagctcttgcctaaactaatctggggtgaggtgaatggaagtagcactttaattgtattcattctttgtagctggacctgggcctgggctatctcctgacatttgcccacaagaaagatttctgaagttaggtaggaatggctgttgagtaggccagtgcttgccaaacctttacacatcctcacatatgtcataatatgcagataaaaagataatcccttatacaacttgctgggataaactcaggaggcttacagcatgacctgcttgaaggttcttcctgccttagaccttgctcagctgctccaggatgaggggatttacatcacagcacaactgtattttattcacagcataaaccatctctttccttctcagttgacgagttcagatgggcaataacagtgtctgccaaagagaaaaaaaaatgtattcaaactagataatctattggtacaaataccgagacacagaagtgataacagctttaagccaatgtttgatggtggtagtcccagcaagctcttttctgatgtctttgtgcctttgcacatgctccttctctgtcactgttttcttcatcaaacataatataatggacaagtggaatcaaatagaattgagttcaaattctctgctacccatcggccctggtattggacaaattaactcctctgagcctgtttcctcatctgcaacgtagactagctaatactacccattggaaagcgttgtttcttagctaatgcatgcaaggcttaaaacctagatgacgggttgataggtgcagcaaacctccatggcatacgtatgcctatgtaacaaacctacacgttctgcacttgtatcccggaacttaaagtaaaaaaaaaaaaaaaaaaaaaaagaaagaaagaaaaagaaaaaaaaggctgtttctggggattaaataagacaattatgtaaggtggccagcacagttcctggtacatagtaaatgtcaggcctgcctgacagacttctattcagcagctactgctcccctgaaaatcttcctcagacgtttccacggtgcttcccgttcttacaccactacaatcctttattacactactatccgttcattccccacagctccctcccttcctttccctaaccagtgatcccaaaaggccagcaagtgtctaacattttctatcttctaagtgactggtaaagttccgcacctatcagcgctccaagtttgtttttgttttggccgactttgcaaaacggattgggcgggatgagaggtggggggcgccgccaaggagggagagtggcgctcccgccgagggtgcactagccagatattccctgcggggcccgagagtcttccctatcagaccccgggatagggatgaggcccacagtcacccaccagactctttgtatagccccgttaagtgcaccccggcctggagggggtggttctgggtagaagcacgtccgggccgcgccggatgcctcctggaaggcgcctggacccacgccaggtttcccagtttaattcctcatgacttagcgtcccagcccgcgcaccgaccagcgccccagttccccacagacgccggcgggcccgggagcctcgcggacgtgacgccgcgggcggaagtgacgttttcccgcggttggacgcggcgctcagttgccgggcgggggagggcgcgtccggtttttctcaggggacgttgaaattatttttgtaacgggagtcgggagaggacggggcgtgccccgacgtgcgcgcgcgtcgtcctccccggcgctcctccacagctcgctggctcccgccgcggaaaggcgtcatgccgcccaaaaccccccgaaaaacggccgccaccgccgccgctgccgccgcggaacccccggcaccgccgccgccgccccctcctgaggaggacccagagcaggacagcggcccggaggacctgcctctcgtcaggtgagcgagcagagccgccgtcgcctcacgcgggaagggcgccccgggtgtgcgtagggcgggcgcaaggcggctcggcggggacccgtcctcgccaggggccgggtcccggcgggaggaggcgccctccctgccccccgccacggcggagcgtctgcagaatggtgacaggattctgggttcttgggcgaggggtctcggcttcaacttgacaggtgtcgggcgggtggggctagggtcctgagcgaagtgacaggtgcagttccctcttgtgaggctcggaggcagagggtcgttgcgagcgtccatcagacgcaaaaaatgaaaaataaaaatacaaaaatggtgtctgtgggagagtttttcaccggagaattggagtactccggtggtcgtctgactttctgttttggttcacgcgatgcaacagttgggaagtattttcttccgggcgtgcactgcatctgaagtccatttgtgggagaggccgaccagaaagccttggacaagaagcgcagggtcctgagtgtccattgcccacaggatactcggctcaggagctttgcggcgtttccttagaacaataatgcatcgaggccttggggactcaaagccatctgtagtgattgatggagcgtaactctttagaggaactgaaacatgggcaaaactttcatgagacatttaccagaagtgcttgaaagtttctaaacttttttttttcctgtttgatgaactcttcttgcgtgttagtcggcttcggcttgtctcattatttcttccattttgccttttgactttgaaccagcaaggatcttggtgtcccctctttttgcctttgtttttggcacaaaattagtggttctgtgcgcaaatggaaattttcgttttcccttattaagtggaatctaaatttaagcaagtccatacgaatgcactagatcttgaagggaagtatttattgtattacaacatcttacttttcttgatttttctactttatggttaaatagctatgattgaaagagtgtaattgtcattattgtcagcactggttctactttgagacaagttcattgcagagggaatgggacttgtttctgtttttcactattttctctcccattcttgtctatcaccaaatcctttcaccctcacccatttctttccactcggtatacactaacaattcacggcagaaaagattgaagtgggatttaggaaatggcccctggaaggctattaaaaatttatatatttaaatggactgtcttataggtcagttaaaaaccatattcgttaaaaaaccaaaataacaacaacaaaaaattaaaaaccacgtctggggcatgttctgggaaaagacatggctttagtttctgattaaattctgatgtatccaattcttgcaaatttcccttgggaaaatgcagtaatggctactctaaagaattccatgttatgcacacagctttggaagcatactctaatgtagggtaaccaggaatattgacgttgtggccactgcttggaaaaaagaggactgtttctttcattttttaactcattttatatattttaagtaatggaactataaaaaattctcttataagtcaaaaccatacaagatacagtctgttcttgattatccatacccacaaagggtttcattaacatagacagttgaactctataaattaaccagcaagggtagaaccactgccgtgcagtctgatactgagcatcttgcctggagatggaatcaaggctcagtccaactgcacctccagtgacagattccattcctgatttgagagtttagatcttatttctgttgccttatctctggcctaagtaatgtagctggaagggaaactgtcactaggaacagcataccacattcattgttgaaataatcaaaggttaatcatgtttcgagctgggtgtgatggcgcgtacctgtagtccatgctactcaggaggctgaggcaggaggatcacatgagcttgggagttggaggccagcctgggcaacaacgcaagaccccagtctttaaaaaaacaaaaaagctgaccaggcatgttggctcacgctgtaatgccagcactttgggaggccaagatgggaagattgcttgaggccaggagtttgagaggagcctgggcaacaaaacaagaccctgtctctaaaacaaattttaaaaaattagccagtggctgtggcacacctgtaggctcatctactcaggaggctgaggtgggaggatccttgagcccaggagtttgagactgcagtgagccatgatttcaccactgcaccccagcctggatgacagagtgaaaccctatttcaaaacaagaaaaaaaaacaaaaactaattatgttttgaaggaggaattggcagtctagaatagtggtcaagggcatggattatagagttagactgttgggctcacatagtggtttacctcttaccggctgagacctcaggtaagttctttaacttctccaatttgacagacatctgtaaatgtctacttttacagatgagaatacttatctaaaagggctgatgtcgggattcagtgaaaccatatgtttaaggtactttctacaggatcatagtaaatactcaaaaattattaattattcttcatactattcttattagtagataacacatagaaattagatgaatgaaaatgaattagccaacaagaatttattaaatgcttgtctttgttaaggggaaaggacaaaaataagcagtcgcatcatgtaagatgtgctagtaggtagagagatatatgaaacattgataagagaagactacagtttaacaaagtcactggcgttgaattgtataatattatctatgggtttttatctttttgttgttatctttatcctattttcccaaacagctttagctattacatttactttccttcacagaagtgttttgctgctttgaagtatatttgacttaccatgcaagcaaatatttttcactgtgtggtatccttattttggaatgaccatgaaaaagataatcatatgtttaaatttgaagtgtaatgtttttctaagataaaataagatcttaaagtatttaataatgttctttttcacagtagtgttatgtgcaaactattgaaacaagtatgtactgaatcaatttgatttataagtatatgccaattatatgattattttcatttggtagg

SEQ ID NO: 7 - DNA, 5312 bp, Homo Sapiens
gtcggcctcgggggtcgacgatcccccgggtaggcgacgtgccctgtccaggcctcacttcccgcgtccgcaaaacggggtggacaacgcagcctaaggcagagccgcgccaaggtccctcgctgtcgccgggctctggcggcctgaccgggcctggggtccgagcgtgcccccgggcctgggggggtcgccgcgatggactcgctggcagcgccccaggaccgcctggtggagcagctgctgtcgccgcggacccaggcccagaggcggctcaaggtgcgtgtgtggagagggcggaacgtgggtctgtgaccccgcgggctccgggactcggcatggggtccccgtccccgcgcgccacggcccgccagcgcctaggctcagcccttccctccgcagcggcctcgcaggtccgcggccccacggtggggcgacgtgccctgtccaggcctcacctcacgcgactccaaaacgcggcggagaatgcggccgtgggacccctccaggggccccaagggtctgcgggggctgggcgcctgggcgcgcgggcgggggaggctcggcgccgcggtctataaataggcgctgctccgccaccgccgctgccgccgcccccgcggctggatccgggccaggtggggcctcccgccccctggcactctccggaggggtgagtgtcgaggcccccagcttctccggcttatggagggccttgagtgtgtcccaggggtcccaatcctgctgccctctgcccgaggagggaggacatcgcctgtgcctgctgcggcctgacatctccccacggaataaatacagtgtcggtccctgcagagccctccctgggattggggccaggggtgccttctcctgccaccacctcgcctgccttcttatctccaggcttttgcccacgggccctccccttatttttgccaacgaaatgccccaccctgggaaccgtaccctctgctgtctcctcataccgcatttggtaagagacagggtattgggcttctggagaaacctttgtgtccctaccctgttccatcctgtccccaggacattgacaagcagtacgtgggcttcgccacactgcccaaccaggtgcaccgcaagtcggtgaagaaaggctttgacttcacactcatggtggctggtgagtgggccaggctcctcgggggagtggctggggtcactggccagccaagctctgtcgttggagccccagacctaacgcagctccttctctgtacctgtgtgcaggtgagtcaggcctggggaagtccacactggtccacagcctcttcctgacagacttgtacaaggaccggaagctgctcagtgctgagggtgagtggcccccaggaggccctggcactgatccccagtccccttccatgggacctctccaaggactccctttcaggtccagctcccactgttctgttctcgcggtgtgggtcccctgggggtagggccaaggcaccaagatggatgaggacgagggtcctggctgccaagggtgaggggctgagggttggagaggcccttccagtggccccttccccgtagagcgcatcagccagacggtagagattctaaaacacacggtggacattgaggagaagggagtcaagctgaagctcaccatcgtggacacgccgggattcggggacgctgtcaacaacaccgagtggtgagtgaggcctgctgagaaaggccttgcctaggcggccacagcactcgaggcctggcctcacctccctcctgcccacagctggaagcccatcaccgactatgtggaccagcagtttgagcagtacttccgtgatgagagcggcctcaaccgaaagaacatccaagacaaccgagtgcactgctgcctatacttcatctcccccttcgggcatgggtgtgtggctgtcctggggccaggctcgggagtgcagcccctacaatatggccccctggctgtgcctatgcccacccttggctgctctcggcaggctgcggccagtggatgtgggtttcatgaaggcattgcatgagaaggtcaacatcgtgcctctcatcgccaaagctgactgtcttgtccccagtgagatccggaagctgaaggagcgggtgagcctgccgtcgcacaggggcctggccagggccctggggctgagagtaccagggggacttgtctggcctcaaatctgatggtccttgccccaccacagatccgggaggagattgacaagtttgggatccatgtataccagttccctgagtgtgactcggacgaggatgaggacttcaagcagcaggaccgggaactgaaggtgaacatgcagactggtggggcaggggggatggagctggtgaggggcagaaccagagggctttgtctccttcacattgagcctgctggaggagggccaggtcagcccagttgggtgcaagagtcatttgttctaggagtagaggacctgtacccccttcatccagggctagaaggtaaaggtcaccatgtctttgcctggctggggtgggtcatgtgggccccgtgtggtgcttggcaggtatggagcacttgcccagatccagaggtgcagcagtgggccaggcccccaaccccaaccctcttcccatgggtcaccagaggaaggggctgccccagtggcacaccctggctcccagatttctgagctccagggttggtggctttgggtgccccggcagctagagtgatgatggagaccatgccaggggcaggtggccaccagggcaggggcatcagcatggggagacataggctcagccctggggagggaaggggcagctggagggggtggttcttgatgagggaggagatgaggagggagcatgcctggttgggcatagcctggaaaggccctggaatgtgagccacatgggctctggctccagccaggggcagagaggccagaaaggggcaacgccaggatctctttgaggagagatagttgatggtgatgctggaggggtgccccgggagttacatgcccgtttcccatcagtaaccgtgcaattacgctcaccgggtgtgagcctttctccctccttcccccaggagagcgcgcccttcgccgttataggcagcaacacggtggtggaggccaaggggcagcgggtccggggccgactgtacccctgggggatcgtggagggtgagtagagtcttggggtaccaggtctggtgggggaaggctgtcctgggccggcgccagcccactacccacccccaccccgcagtggagaaccaggcgcattgcgacttcgtgaagctgcgcaacatgctcatccgcacgcatatgcacgacctcaaggacgtgacgtgcgacgtgcactacgagaactaccgcgcgcactgcatccagcagatgaccaggtgcgcgccccagccgcgagccagacctcgcccctctggccccgcccacgtctccataactgagggccggtcctgtcagcccacccagacttgaactttgcaccattccctaagccccccccctcccccagagcctggtctccctagaaccaagtccagggctgtgagggctccggagggcagggcctcagcagtggcggggatgggccaggcatcgccagcccacgctgagcctcccggtggcgccgccccgcccatcctcccccccgccccgcgcagcaaactgacccaggacagccgcatggagagccccatcccgatcctgccgctgcccaccccggacgccgagactgagaagcttatcaggatgaaggatgaggaagtatgtggggcggcgggggcggcggaggcgggcgtcagggatgctcctccgcggtgctgctcacccgccgggttgtctccgcccgcagctgaggcgcatgcaggagatgctgcagaggatgaagcagcagatgcaggaccagtgacgctcgccgcggacacaccgtccgtctccgggacgccctcgcacccctggacaccagaccggactgttcccgacccggagacgcggggccacagcccccagctgaccctaatttattctcagcaccaccccctcccaggtcattgtgtctgtttccgaggggcctggaccgtagcccccgcccagctggccctctctgaccttgggggatcaggagcgaagttgggcgggacttcagagatccgcctcccttgcccttcccccgcccccggacggtcacagcacccaaaccgcaggccctgctctggcaggcaggcaaagctaggcagaagaggattcccaggatcctgggtctgttccctgccccagtgctgcagaacggacttgggagccctcctttgcctgctcccgcgggtcacccagcgagtgctgagaccccattttctgtcgaggcgggccgagtcttcccttatccccagacgcctagcgggcagggttgggctgaatcaaatgggagccctccagacataaggaggccagaggctgcaaggagcggggtcgtgaccgcttacaccccttctccacagcccggcccgacctggagggcccccggggcactgggcggtgagccacctcctggcaactctcggtgccgtcccctgccctcgctcgaggcctcttctccccagcaccgctgtggtgtgccgggatcctgagcctaggcctcccgatgttcccacccgcatgatcccttcccgccacacgatgctccgttttcttccgttgtgaatgccgcgtcctgtcctggtgacaggagaacaatgttggtgaacgtcgcagcgggtgtccgagtgctccgtgtgcccctgagagcgggtgggagcggaagcctgagcggcctgcggcctccggcgatagtgtgctatctgccgctgcagcgcgcgtccgcgcggcctctgggctatttctggccaggccgcagcactgtggtcggtgcgggcgtggcaggggcggggcggccttatcgctcggctctcccgcctacgcctcccgctgcagagtaagccgggctgccgtcttctcgccatgggctccggtgagtctggagtccggtcgggcccccggctgctccctaggccgacccgggttgagaggagctctggtcgtttggctgcagctgggagagacttgggtcagacttagaggggacttccagccggcgtgcggggtggtcagggtggagaggctggcgggctaccgggacgccgggcatcaggggctggatggagccgggccggcagtctgggtactcagagatgtcgcccaggtgcccgccgaccgctcggcttactgcggcgcttcccttgcagg

SEQ ID NO: 8 - DNA, 3025 bp, Homo Sapiens
ctctcacgacctgatttctacagccgctctacccatgggtcccccacaaatcaggggtacagaggagtattgaaagtcagctcagaggtgagcgcgcgcagccagcgtttcccgcggatacagcagtcgggtgttggagaggtttggaaagggcgtgccggagagccaagtgtcagccgcctagggcttgccggtcgctccctccctccctgcccggtaggggacctagcgcgcacgccagtgtggaggggcgggctggctggccagtctcgggcccctcggccaccccggggaccccccccaagccccgcccccgagtgttcctattggcctcggactccccctcccccagctgcccgcctgggctccggggcgtttaggctactacggataaatagcccagggcgcctggccgagaagctaggggtgaggaagccctggggcgctgccgccgctttccttaaccacaaatcaggccggacaggagagggaggggtgggggacagtgggtggggattcagactgccagcactttgctatctacagccggggctcccgagcggcagaaagttccggccactctctgccgcttgggttgggcgaaagccaggaccgtgccgcgccaccgccaggatatggagctactgtcgccaccgctccgcgacgtagacctgacggcccccgacggctctctctgctcctttgccacaacggacgacttctatgacgacccgtgtttcgactccccggacctgcgcttcttcgaagacctggacccgcgcctgatgcacgtgggcgcgctcctgaaacccgaagagcactcgcacttccccgcggcggtgcacccggccccgggcgcacgtgaggacgagcatgtgcgcgcgcccagcgggcaccaccaggcgggccgctgcctactgtgggcctgcaaggcgtgcaagcgcaagaccaccaacgccgaccgccgcaaggccgccaccatgcgcgagcggcgccgcctgagcaaagtaaatgaggcctttgagacactcaagcgctgcacgtcgagcaatccaaaccagcggttgcccaaggtggagatcctgcgcaacgccatccgctatatcgagggcctgcaggctctgctgcgcgaccaggacgccgcgccccctggcgccgcagccgccttctatgcgccgggcccgctgcccccgggccgcggcggcgagcactacagcggcgactccgacgcgtccagcccgcgctccaactgctccgacggcatggtaaggccgggaccccaggaagtgaggaagttagggcggcgctcgggatatcagggacgcgtttccgagggcggggagctggccttgcgggaggtttgggccaggatccttcccgagagagaggacccccttgtcctgggcagctgtcactggggtagcctgttttggaagtgtgcgggcaagcgttcgagctgccccattgggggcgctattagaacactgcagcgcgaacgtgaagatctttttctctacttatccctacttccaaaatgtaaatttgcgccccttggtgactgtccgcccttggtttggccctgcatgttgcagacctcatctcctacccacccgtaattacccccccaaccaggacaggtctgggcccggaactagagccttaggctagagttagggagggggcggctacaggaattggtgttcgggcctcgagccgtcccgcgggcctgactcagtcgcccttgctgtttgcagatggactacagcggccccccgagcggcgcccggcggcggaactgctacgaaggcgcctactacaacgaggcgcccagcggtgggtattccgggcctctccctgctcgctcctcctccttcatggagctgtcctggcctctatctaggacgctcccacccccactcacacacgcctatgtcctgggaagtggtgcaggagatgaaatactaagcaagtagctccctgtcttttcgattgtcccggactctaactaaagtcctcagtttccaatctgtctcaaagtactgggcccgggggtgggaggcttgtcgcggccccacccctgcttactaaccgagccctccccgcgcagaacccaggcccgggaagagtgcggcggtgtcgagcctagactgcctgtccagcatcgtggagcgcatctccaccgagagccctgcggcgcccgccctcctgctggcggacgtgccttctgagtcgcctccgcgcaggcaagaggctgccgcccccagcgagggagagagcagcggcgaccccacccagtcaccggacgccgccccgcagtgccctgcgggtgcgaaccccaacccgatataccaggtgctctgaggggatggtggccgcccacccgcccgagggatggtgcccctagggtccctcgcgcccaaaagattgaacttaaatgcccccctcccaacagcgctttaaaagcgacttctcttgaggtaggagaggcgggagaactgaagtttccgcccccgccccacagggcaaggacacagcgcggttttttccacgcagcacccttctcggagacccattgcgatggccgctccgtgttcctcggtgggccagagctgaaccttgaggggctaggttcagctttctcgcgccctcccccatgggggtgagaccctcgcagacctaaccctgccccgggatgcaccggttatttgggggggcgtgagacccagtgcactccggtcccaaatgtagcaggtgtaaccgtaacccacccccaacccgtttcccggttcaggaccactttttgtaatacttttgtaatctattcctgtaaataagagttgctttgccagagcaggagcccctggggctgtatttatctctgaggcatggtgtgtggtgctacagggaatttgtacgtttataccgcaggcgggcgagccgcgggcgctcgctcaggtgatcaaaataaaggcgctaatttataccgccgtggctccggctttccctggacatgggtgtgggatcc

SEQ ID NO: 9 - DNA, 11913 bp, Homo Sapiens
taaagcagggtgttactaaagaaagaaggaagaaattggctaaacgaatttagaacacaaataaaattactgcacaaataaaatctctgcttacgattaagctggaatggcggtcaaaaaagaaaagggaaaaaaaattcctagatgcaggtagatttctataattaagccatttctcaaaggggaagtaaatgtgacagaatatttagcaagcaaatttactgaggaatattttgttcctatataattaaattcaacactgaggtaaaactgacaactattaaactgagggcagttgggagagggaaaggggatgagataaaatccagtctataaaacattccattatcttttataggttaaaaaacacaaaagaaatacttggaaagaattgtctaagacggaaagattttaagattgtgtgactttttttttttttttttttttttttttttttttacaggtgcagaataattttttttccctctctcgtggtttttcttttccccatttttttcccctgttgtttgcaaagttgaatctggggtcaggagttctaattgtaacctcagactggaattccagatggtgcgctcaggactggaagcaactctcagttcatcaatttcatgggcctacgtatctgctctggccacggcctggcctccatccccactgtggcattaatgcagaacaaattgagacatatcctctatataattagttccagaatttaaaaagatttacggtataataatagaggcagtgccgcggaatcctttcactgaggactctcggggagctcggggaccatctcgcggtggcatcagaacagacgagtaaccccagcggctccaggcactgcgaactgggggagagggggaaattttgcaccgcattcggcagtacctaacggttccgggctcccagatagggtcagcgaggagagttaggacagtaagtggggactggttaaaaaaaatcgacttaattttgaaatgatcagaagaagctgggagtagttatcacaaagcccctcccttgcccccccctttttttaattgaaggaatgacgttgaaattttcaccgccagcgcggggctgggaaccatcctaaacacttgccctgcagccccgagtgggcagattccgaagagttggagtcggcggggaggggaggaacagctgttgggctgtcttgcgcgtggggctcggggcgcgggccccggggagaggcgctagtcgaaagcttgttcctctcccgcgacaggcagcagcgaggtcgagccactctttattacggcctgcgggccccgcgcgcagtgtggctgtccccgcccttgaccgaccgcagcgctttggggtgtttattcagttgtccgcggccgctgggtgactcccggagggcggcccaggcgtgcgcactggtccctggggttgcggctgtagcagcccagctccgcgctctgtcagatgcagtggacagcgccggggtgaaagtaagggttgagaaatcctcactgccctgctcctacccagcctcgattttttcatattgcaataattatgcaccttcgaggccgggatgcctgcgctttgccagtgtatcaacgccacatggttttccaggggctgtcctcgcctctgcatcccattagctctgaagaggtagaggggtggtgggtaaaacctccaactggacgttgagagacccgggtttcagctcggcgttgccactaacttgtttcctgtccttaaacagtagtagtaacaaaaactgtaaagttgattgagtcaaaggcccacactgctctcctatctaatcctcagaacaactctatgaggtgggcgctagtatcccattatcccgtttgaccagtaaggaaactgaggctcagagagactgcggaactcgtctagggtcacacagctgttggttacctggcagagctgaggttccattctggggccaccaaccccttgctctttaccgctgcgctccatagactgcctctccttcggctgtctgggcctcagtttccttctctgtaaaacgagaagtttaatctgcagctttctttgccaatcggtggttcagaccaggaacctctgctacagatctcggcgctgacaggggtaagaaggtgggtgaaagaagggggcgcccagttttccacagcctgcttttctctgggacctcgcgaagggcgggcctcgcgagctaaaggaggtacaggagagcgcctatcgtccgcggcgggtgaaggtgctacctgccttcgtgctaggctgtgagtcctggtgcttagctcagggcgccaaggccagtgtagctggcatgtcccccttggaaaacctcaggtctcccgcagagaacgttacccacaacaaagaagaggacagagaggcatggagcgccctgcgactgcaggagtacgtcagttccccagcgctggcttagtgtcgcctgggcttccgggcatgtggatccgttggggtcgtacggagacttcctgtcgggtccctggggtcctccgactgcggctcctcagcttagcactttcttcttggccccgcaggctgcagggaactcctcccacctctttagtcggagaagtccaagtcgggcgagggggcaccccggggttcgcaccggtgctcttcccctccccgcccccacaaggattctgagaaaataaatggcagaggagagaggagttctacatttgcttggctctcctttcctcctatccacccctacatccctcaccccggggcaaaaacttatttttgaaaaatgttggcagagatttacgtgtctttgccttacctgggtttcacaaacacaacgactcacattcaagccagcctcccttcagataacctcctctccccccgctaaaagtgccaaggatggtaaaagaagaaacaatctcaatcttttcgtttggaaatgaaagtccccggcttttcataaagggctcctcgcccctcacagttgagtcctagttaagaaaaacgacttccaagtagaaataataggcggggagaaggaagggagatacagggatctggggggttcttagggcaactggcagtgaattttgtctcgagagtcctttctccactcaaaaaaccaaacgcgcgagccccgcgaaaggtttagggatagatcgtgtgggagaggactgagcagagagcgtgggggcagtgtcttgtagaatctttcttttcttaataataattttaaaagcttctgagtggagacgacgcaaagtcaagcagcaaaggtggcctgggaggcaagcggagggctcaagtgccgcatctttaccctcagggtctcctgcgcctacgggatgcgcattcccaagaagtgcgcccttcgagtaagtcctgggcccgcacacacttcgggtccgcagccagaatttaatggcgacaacgtttatgcaatgcaagctaaaaaccaaagcgtaaaaaattactatgtcatttattgaaacgccattctttgtcaaactgcaactactttgcttcacataagtttggctggaaagcttgcagccccagcccgggccagccaggtacaggaggccggactgcaaccggttgcttccctcccgtcgcgcctggccgtcccacgctgcgccgtcgctgctgcctcctggcgcccctgggattttatacgcacctctgaaacacgctccgctccggcccccggttcttctccttgcctaggggttgtttcccaatagatactgactcctttagaagatccaaaaaccaaaccaaaacaccccctacccgccccaaacacctgctctggggcgcgggggctgccaaacagagactagacgaagggagtcagatttagcgaagctcttcgagctcccaaagattcgaacactaactcgcgcccgtgggccgatggaggttctccctactccactccttggtccccttaactggcttccgcctcctggtcaatcactgagcaaccagaatggtatcctcgaccagggccacaggcagtgctcggcggagtggctccaggagttacccgctccctgccgggcttcgtatccaaaccctccccttcacccctcctccccaaactgggcgccaggatgctccggccggaatatacgcaggctttgggcgtttgcccaagggttttcttccctcctaaactagccgctgttttcccggcttaaccgtagaagaattagatattcctcactggaaagggaaactaagtgctgctgactccaattttaggtaggcggcaaccgccttccgcctggcgcaaacctcaccaagtaaacaactactagccgatcgaaatacgcccggcttataactggtgcaactcccggccacccaactgagggacgttcgctttcagtcccgacctctggaacccacaaagggccacctctttccccagtgaccccaagatcatggccactcccctacccgacagttctagaagcaagagccagactcaagggtgcaaagcaagggtatacgcttctttgaagcttgactgagttctttctgcgctttcctgaagttcccgccctcttggagcctacctgcccctccctccaaaccactcttttagattaacaaccccatctctactcccaccgcattcgaccctgcccggactcactgcttacctgaacggactctccagtgagacgaggctcccacactggcgaaggccaagaaggggaggtggggggagggttgtgccacaccggccagctgagagcgcgtgttgggttgaagaggagggtgtctccgagagggacgctccctcggacccgccctcaccccagctgcgagggcgcccccaaggagcagcgcgcgctgcctggccgggcttgggctgctgagtgaatggagcggccgagcctcctggctcctcctcttccccgcgccgccggcccctcttatttgagctttgggaagctgagggcagccaggcagctggggtaaggagttcaaggcagcgcccacacccgggggctctccgcaacccgaccgcctgtccgctcccccacttcccgccctccctcccacctactcattcacccacccacccacccagagccgggacggcagcccaggcgcccgggccccgccgtctcctcgccgcgatcctggacttcctcttgctgcaggacccggcttccacgtgtgtcccggagccggcgtctcagcacacgctccgctccgggcctgggtgcctacagcagccagagcagcagggagtccgggacccgggcggcatctgggccaagttaggcgccgccgaggccagcgctgaacgtctccagggccggaggagccgcggggcgtccgggtctgagccgcagcaaatgggctccgacgtgcgggacctgaacgcgctgctgcccgccgtcccctccctgggtggcggcggcggctgtgccctgcctgtgagcggcgcggcgcagtgggcgccggtgctggactttgcgcccccgggcgcttcggcttacgggtcgttgggcggccccgcgccgccaccggctccgccgccacccccgccgccgccgcctcactccttcatcaaacaggagccgagctggggcggcgcggagccgcacgaggagcagtgcctgagcgccttcactgtccacttttccggccagttcactggcacagccggagcctgtcgctacgggcccttcggtcctcctccgcccagccaggcgtcatccggccaggccaggatgtttcctaacgcgccctacctgcccagctgcctcgagagccagcccgctattcgcaatcagggtaagtaggccggggagcgccccctacgcgcggggcagtggcgccagggactctccgctctaggacacccccctctcctaccccttttgaccgcagctcttacccagctgcttcccaagggccgtgaggatagcggaagcggcggctggggaggaggccggagagtgggagtgcacgcaggcactggcccccgacatcctccaaagccaggcagagctaggagcctgactgttcgcaagagccgggagggcgtctggggccccttagagtccgagagattccgggactgctagtccccacgggagtggaaccaggagaccggcgcagtgtctggctctgccttggggagagttttgttaattaaggaaacgccaaattgtcaccaagcgtagcgcttttcagacgtctggactctggattcggagtgggaccagcgcgggggtgagcgcctgtgctgtgctgcctccgcagcgctaaaatgtccaggagcacctccagcccttataatacggtgttggcacacacttaggtgcacattaagtatcgtagagaactagaatgagcacatgcacctccagtaactaaatggctttctggaacagcgtcgtgtccgtggatagctcccgcgtatggtaatacagaagtggatcttcactgggcttcgctcaggcggcggccacgcaggttctggggatggaagagaacttgacttatccgagtccaagctatgcgggaccaggttctaccgcaggcagtggaaggaggcacgagctttggcctttctttcagcgcatctggggcgcctcttcatcttgtaaacgcggggctcagctgggacagtatttcttcaagacctggggttagaacaaggacagggttattcgctgtgcttagtcaggatacaaggagggaactcggcacacgataagtatcaggttggtttctcatcccgcgccgatgcccgcccacctctctttcgcctgggcggcgcggacccgaacctgcggagcccctgtagtttgccctcttcatttattttcagtggatttccacgctattgagaacctaagccagttcggtttgattcggtaatttagtaaacgctttactaatacaatggcggatgcttttcctggagcaaaattactcgagggcctagggaccgggatgtttttggaatgcgtgggaagcagagtgtatcttttgcaggaggtaccttcgcccaaggctcgggagaagggctctgcccttgttgcccgccttcacccgcgccttctaaacgcgcgtcttcaggccgctcctaccttagcctaaccaggagcacccggcccccgcgaagccttggagaaatcgaaaccgcccttttcttcgggagaatctgggatcactgtcctgtggaggaaccgcaagcagacccaagggttgcctccactctatgcttttagttagtgaaattagtgttttgtactcaaggggcgttgggacaacttactggtcgctgaggcttgtgttctttgatcagatcgcgccacctttgtttagcaggctggtgttacttttggggagtttctaggtctcagtgtccccgtctataagaggacagctgagatgggcaacctggagattgggtccggcttgaagttatactccatagatgcagaagcgctacccaccaccctcttggggctttaaatatggaactcggcaacccatctaaacatctgtgactgagaaacaatgaatccgagagcactgtctgcatgtgtgctatttggaggcggttgagaaaccatcgaatccatgcccctggggcacaaaatactactacgccattatctttttagtacttctaggggatttttgaaacctgggttctgtcgcttcgtttgggtcccttgtccagcccttttcagggcaggtctggtgcctgggatcttatcacatgtcgtggggggtgggactgtgggttttgcagccagcaggcattacacttctggaaaatatctggattcttctgtaatatacaggcgtggctgccatggagaaaaagttaaaaggggaccaggactagtaggtgaatgtatccttcttctccaccctggagaaaaagcccaatggagagagggccctagattcaagtcatatagcctggaagcaccatctccaggtttaagttttgtcttgcagtgaaaacagatgggtccatcttacccagcccttgaggctcattgggcagcttggatgtgagaagcgctccggctgctatcctggagtgggcaagggtggccctcgagattctgggtttattctttggatttccagggttcctgctgcttccccaggaatgcagggcctggcccaagacttgggctgtgagaggcaagggcatcaactctcaaaaatgtggaaatggccatcagagcgccaaggccaaaccccaggggagaggaatcaaggccgtctctggatccctagggcagtctagccatggtgcacaggcaggggcaattgttggtacccactcacaaccgcccaaaacttcacaagcatgttcatattttaaattcttaaatattatatcttgcatcctaatcttgtaaacattaatttagcaaacatcaatcgcctacttggtcaggcactgggttctgaatattaattaagacaatggcctcgagaacctttgcaagaagctcaccagctaatcctggagaggccccttgttttggatgaggaaatccaggttctatgagattaggtggcagaggtgggatttgaacccagaccatgctagggtgtttctactccttttccagggatcttggccccaccgttgagatggatttcttctggcctgcgggaggggcaccaaactcttagtccatgtgtgggggttgacgggtttgtgagggcagatgtggggtgaggacttgagtagccccagactagatgcaaggcttaaggaggaggggaaaaaagcttgcttgggccggacgcggtggctcgaggcggttggatcacctgaggtcaggagtttgagaccagcctggccaacacggtgaaaccctgtctctactgaaaatacaaaaaaaaaaattggccgggcttggtgacgggcgcctataatcccagctactcgggaggctgaggcacaagaatcgtttgaacccgggaggctgaggttgaagtgagctgagatcgcgccactgcactgcagcctgggcgacagagcgaaactccgtctcggaaaaaaaaaaaaaaaaaagaggttgcctgctagtccactgatcccgcagccccgcaggctcgcagaaccctaaggcatgattaggcctgggatcatcaggccaccctagggtcaggtgcggaggcctgcgacgcccgagggccaaaggctccctcttccggtcacacaggagagggtattttgttgggggacaggttttccccaatcacagtgcagctgcagtcatcgttttcagccttctgagcaccttcctggctgagcctgctgtccatttcacccctcagctctcacggcccggccaggccaggcggttcccggcttctctgcagccgccggcgggggaggagggcacagagcgcgtctcgcctcttagcgcacggtcaaggttgcgctcccctcccgggccgggactaaccgtgggaaaggcgctaccttggccactcgattctctccctccaaggcctgtacaaggagcctttgaacacgctgctccttccagccggcagctttacctcccctggcccctgcccccgcactctccgcgccaggccaagcgctgggcccagggacagcgcgctctaatcaaacccgtgtccgataagcttctaattaaaagagacctccctccgctccgcaggcgctttcaccactgcccctcccggggggacctgaaggagagggtttgaggccggtctttgcccgccgaggtctgcgtgtccggtctgggaggaggcctaggagggctcgcgggccacgggcatccttgggcccgagttctggggtgcggacggacgtctcgagagtgggtgccgcgactcgggacccacggccctcgccgggcacggacagttgcggagcagggctctgaggattgtgcagtgccctgggtccctgcctactcctgggctcaggaatggagaagggttcgtctagagaaaacttcttcgtagcttctatttcgtctctctctctctctctctctctctctctctctctccctccctctctctctctctctctgtgtctgtctctctttctctctctctctttttagtgtcctttcagaaattcggccttcactccgggcaatagtgggtgccctgagccaaatttcgtttgtaagctcatctataggcctcaaagaaggccaggcctcaggtttcaaaaggaagtctgtggaagcccaaacgtgctcgcccatgcaggagagctaacggggccgggggttatctttgcccacttagcaggagagaaatggaggccctcgaggtcatatgataaaagctagtggcttctcaaatccccagtgtgtggtgctgagcagtgtgtgagacttaagcctggacctgtactatccgggagttaggatttgccccctccttccctcccttgcactctgccacaccaccctccaggctcatgcctctgttgccccagagaagctttttttttttctttttctttttttttttttctgggcggggggtggtggtgtgtgtgcatgagcgtccgtgtgtgtttcgaaaatggaggtaacgatgccctgggtcctgctcatcggctgagtcctgcttaagtctttggaggcactttggtcaaatagtgcaagagtgggagaatgggtgctgtttgacccaatttactcctgagaattttgtgaagtttggagacccagggcagtcctgggccaggaggatctgaggctgctggggtggccctgccaggatcccataggagcagctctccttagccattgtgtctggacttcaggccacagactccggaacttgtagaggaatgagaccccatccttgggttccggggccaatgacgtatctttagccgaaggatccttttccccagaggcagcaacagctttccagaagcttgtggggtataagtttaaagcaatttaataacaaaaattataaaagactatgttttccaactgaggctccacgctctttttctcactttgggggggggggggaatgctaggatttccctagggggaaactgaggcaaaggaccgaagcactaccatggagggaaagggagatacagtgtcaggcacactctaaaggaaattggttgtccagcctggggagtgaggaagttggctcctacagcagtggtcagggtcggacccctgggcgcaaggtgggtcccataggggggaggaggaggagagcgcagggtcgccatctgaaggcccaactggaaggggcccttgttttccccctcaccagctttcccttgggtgtcatggtgtcaggtcgggtagccccagacagataacattactcggtaattactcttcccatttttaagaccaggccatttaactggctccgagtaattaatgaaagttggtgcgcgggcccctgatttacagctcggagtcaacgcggggttagcccagcagattcatttcgcttgcccgcgctgctcctgcggaagagctgcagtttatttttggggggtgaacaaccttctctgtcgatcaggcaacgagttttatacttaatttgccaggggttcgctgcagaagcggcagagaccgtagaagactgcggcataaataaattgggaaaaagcgaggtgggggttttagtcagaaaaggatggagaagcctgtcccaaggtcacatccagggacttgggccgtcttcctgccgaaagtcctggaggcttgtggggctggattctcctccgctgggggtccgaatgcggggttcagcgcacaccccccccgcccgtggctggttcagacccactgccccgtcttgcgagagcaccgctgacactgtgcttctctccgccgctcccgcagg

SEQ ID NO: 10 - DNA, 4316 bp, Homo Sapiens
ctgcagctaataaaaaaaaaaaaagaaagaaagaaactggtctctgtcctatttcatatgctcaggtacaacttttccagagaagaagaggaggggggcggggaggagcaggaggaggaggaaagaaggaggagaaggagaaggagaagaagaggaagaggaagaggaagaagaagaagaagaagaagaggaagaggaagaggaagaagaagaagaagaagaagaagaagaagaagaagaagaagaagaagaagaagaagaagaagaagaggaagaagaggaagaagaagaaactgtctctagaccttcattctcaggacaagttcattgtctggcaccaagctccttggggtgaattttcttccaaaagagtccggggagtccaggtatggaatgggaggcagaaagttcaatcaagggactgggatttcggaatgaataatgaagggagatggactgggtccatgccgaaggtttctccctggtttctcagcccccgggcgaagactcagggagacattgagacacaccctgcacaggagggggagggggagggggagggcaaagtcccagggccccaggagtggctctcaagggctcaggccccgaggcggtgtctggggttggaaggctcagtattgagaattccccatctccccagagtttctctttctctcccaacccgtgtcaggtccttcatcctggatactcataacgcggccccatttctcactcccattgggcgtcgcgtttctagagaagccaatcagtgtcgccgcagttcccaggttctaaagtcccacgcaccccgcgggactcatatttttcccagacgcggaggttggggtcatggcgccccgaagcctcctcctgctgctctcaggggccctggccctgaccgatacttgggcgggtgagtgcggggtccagagagaaacggcctctgtggggaggagtgaggggcccgcccggtgggggcgcaggactcagggagccgcgcccggaggagggtctggcgggtctcaccccctcctcgcccccaggctcccactccttgaggtatttcagcaccgctgtgtcgcggcccggccgcggggagccccgctacatcgccgtggagtacgtagacgacacgcaattcctgcggttcgacagcgacgccgcgattccgaggatggagccgcgggagccgtgggtggagcaagaggggccgcagtattgggagtggaccacagggtacgccaaggccaacgcacagactgaccgagtggccctgaggaacctgctccgccgctacaaccagagcgaggctggtgagtgaacccggccgggggcgcaggtcacgaccaccccccatccgccacggaccgcccgggtccccccgagtctccggatccgaaatctaccccgaggcagcggacccgcccagaccctccacccgggagagtcccaggcgcctttaccgaggttcattttcagtttaggccaaaatccccgcgggttgggcggggagggggcggggctagctgggcggggctgactgcggggaccggctagggtctcacaccctccagggaatgaatggctgcgacatggggcccgacggacgcctcctccgcgggtatcaccagcacgcgtacgacggcaaggattacatctccctgaacgaggacctgcgctcctggaccgcggcggacaccgtggctcagatcacccagcgcttctatgaggcagaggaatatgcagaggagttcaggacctacctggagggcgagtgcctggagttgctccgcagatacttggagaatgggaaggagacgctacagcgcgcaggtaccaggggccatgggcgccttccctatctcctgtagatctcttgggatggcctcgcacaaggttgggaggaaagtgggcccaatgctaggatatcgccctccctctagtcctgagtaggaagaatcttcctggctttcgagatccggtaccagagagtgactgtgagagtccgccctgctctctgggacaattaagggatgaaatctctgagggaatggagggaagacagtccctggaataccgatccgcggtcccctttgagccctccaacagccttgggccccgtgacttttctctcaagttttgttctctgcctcacactcaatgtgtttggggctctgattccagtccctcggcctccacttaggtcagggccagaagtccctgctccccactcagagactcgaactttccaaggaataggagattttcccaggtgtctgtgtccaggctggtgtctgggttctgtgctcccttccccaccccaggtgtcctgtccattctcaggttggtcacatgggtgctgctggggtttcccatgaggagtgcaaagtgcctgaattttctgactcttctcagatcctccaaaggcacacgttgcccaccaccccatctctgaccatgaggccaccctgaggtgctgggccctgggcttctaccctgcggagatcacgctgacctggcagcgggatggggaggaacagacccaggacacagagcttgtggagaccaggcctgcaggggatggaaccttccagaagtgggccgctgtggtggtgccttctggagaggaacagagatacacatgccatgtgcagcacgaggggctgccccagcccctcatcctgagatggggtaaggagggagatgggtaaagaggggaacgaggggtcatgtcttttctcagggaaagcaggagcccttctggagctcttcagcagggtcagggctgaggcctggagatcagggcccctcaccttcccttcctttcccagagcagtctccccagcccaccatccccatcgtgggcatcgttgctggccttgttgtccttggagctgtggtcactggagctgtggtcgctgctgtgatgtggaggaagaagagctcaggtaggaaggggtgaggagtggagtctgagttttcttgtcccactgggggttgcaagccccaagtagaagtgtgccctgcctcattactgggaagcaccatccacactcatgggtctacccagcctgggccctgtgtgccagcacctactcatttgtaaagctcctgtgaaaatgaaggacagattcttcacttcgatgattatggtggtgatgggacctgatcccagcagtcacaaatcacaggggaaggtccctgctgatgacagacctcaggagggcagttggtccaggacccacatctgctttcttcatatttcttgatcctgccctggatctacagttacacttttctggaaacttctctgggatcaaagactaggggtttgctctaggaccttatggccctgcctcctttctggcctctcacaggacattttcttcccatagatagaaacagagggagctactctcaggctgcaggtaagatgaaggaggctgatccctgagattgttgggatattgtggtcaggagcctatgagggagctcacccaccccacagttcctctagccacatctgtgggctctgaccaggtcctgtttttgttctaccccaatcactgacagtgcccagggctctggggtgtctctcacagctaataaaggtgacactccagggcaggggccctgatgtgagtggggtgttgggggggaacagaggggactcagctgtgctattgggtttctttgacttggatgtcttgagcatgaaatgggctatttagagtgttacctctcactgtgactgatacgaatttgttcatgaatattttctctatagtgtgagacagcttccttgtgtgggactgagaagcaagatatcaatgtagcagaattgcacttgtgcctcacgaacatacataaattttaaaaataaagaataaaaatatatctttttatagatacaggtagatatgtttttatagcatgcacgtaaatgtgtgtgtgtgtgtgtgtgtgtgaagagaaagagtgaatagagagattaagattcttttaatggtgaaaagatatacatatatttggaattagccagcttgactcagtttaggtgatcccaattttggtggcaacaaccaaagcatcgtagtcaggagccagtcgaacatatgccttcctctctccatcagactgaatcagagtgttgactttggccacatcaatgtcacaaacttcttcacagcctgtttgatctggtgcttgttggctttaacatccacagtgaacacaagtaggctgttgttttctatcttcttcacagcctactcagtggtcagcggaaacttgatgataacatggtggtcaagctt

SEQ ID NO: 11 - DNA, 14147 bp, Homo Sapiens
gggggcactgagcaatacacttagattaacaacatctcacaagtgtgagtaccattgatttaaacttctttgttggttgtgttttgtgtttatgtctgttctacattcattttttccagagttgcctcccttagagtttcagtaatttttatcttttcaaacctttccagccatgggaaggactagcaggtgctagtggacccaaaagaacctcagacctgctgagatttctgattcttggtgttcagaccaattagcaaatagtttaattaaacggcctgctttcatggtcaacacaattctgaactggtggtcatttagaccaagtccactttgtttttgagacggaattttgctcttgtcgcccaggctggagtgcagtggtgcgatcttggctcactgcaacctctgcctcctgggcttaagggattctcctgcctcagcctcccaagtagctgggactacaggcacccaccaccactcccgactaatttttgtatttttagtagagacagggttttgccatgttggccaggctggtctcaaactccgacctcagatgatctgcccacctcagcctccctaagtgctgggattgcaggtgtgagctaccgcgcccagctaaagtctagtttgtataagaaggctttccttgttatgtcacaggattcctgagcctatcaaatagattttaatgttttgagactccacgtacttccccaaaatgaagtatttaaattgtcagtgcctgcccccttgcctggtctttttgatgtactgacctggtctgttagtgtgatgaaaaatatggttgagtcttactgctttattgtaattagtaggactgtctagaagtttaatttttctaagagatgaagatttgagtctatgtagctggctgtcctttaaaaatatttggttacttgggatatactttgaactaactttctggtcattttatgtgatcaaaagtgtcagttcttcctgttcttagtatatttctttgtttgggaagtggaagggatgaaatctctatattctttcctgatgacacagaaaggagtacacatccacatctcatgaatagacatgtaattatagaagaaacagcctaacggccgggcgcggtggctcacacctgtaatcccagcactttgggaggccgaggtgggtggatcacgaggtcaggagttcaagaccagcctgtccaagatagtgaaaccccgtctctactaaaaatacaaaaaattagccgggaacggtggcaggcgcctgtaatcccagctacttaggaggctgaggcaggagaatcgcttgaactcggagggtggaggttgcagtgagccgagatcacgccactgcactccagcctgggcgacacagtgagactccatctcaaaaaaaaaaaaaaaagcataaccatatgactattcacactgccttacatactaaatcagtagtaatttgcttctcacatagcaaataaaaataaatcagcagtaataaacatatcccttttgtgttacagctagcatttggtgaactctgtatttttctcccttttaaagtgttgaactcataggttttcataaggtaagcttacaccattaactaattttgttctcttttttgatgttaaaattgtcccttaggagctgatcaggttcattcttctgttctttaagcattacccccagaatattcttgaaagtattcttgctctctggcaacaacacccatacttcatttatttcctgtccctaaacatacactcagccaacctcaggttccttttaatggagtagtcacttattcattcaacatacgttgggtgcctcctctgtgccacacactgttctggtccctggggatagagcaggaaacaaaaaaaaacaaaatctgccctcatacagctgacattctagtcaggggagacaaacaataaacaaatgaatgatgtagtatgtcagatgttgacagtgctatggagaaagcatatcatggagatcagaagcattacctgcaatggaacagtcatgattttaagaagaatggctgactggatgtgaagtgtgagagagaggagcccaggtttttggctgagcaactggagggatggagttgccattatctgagatggagaagttaggggaggagtagatttggaggggaaggtcaggaatttagtctggaacctgttaagtatgaggcacttattaaacactgaagtggatttttagaagatgtcattaaaactagtcaagttcaggagagagttctgggctagaaataaaaatgtgggagatattggtatatacatgggttcatactacttttttttccaatttaacatcctatcttattgctctctgcttttccaacagtatttagtttcatttacccctcaaactgactcctacattgacagcacaataaaatccacattccttattatattaagaccctgtgtgatctaacctcttcctatctcttggaccttgtcttaggccactttccctccccactcaatttctaacactctgacctcactgcttctcaaacagctctttgttgcctcttgtcctttttgtggaaaaggccttcctactgcttaaccattaggcattcttcgattccttctcattcttcattcttgagaaaggccttccttgaccctttatatcaattaggattcttttgggcgagatctgatccaaactggcttagagaaaaggagtcaactgactggttcatgtaattcaacctccttcctctgctgcaaccttcccttggctcccatctcacttaaggtcaaagccagggtccttaccatggccttgtaggcttcacacagtttgtctccctcattacctctctgacctcacctcttacattcccccttcacttattcttctccagccagagtggcctctttgctgcacctcaaacatgccaggcacactcccacctcagtgcctttgtgtttgctgccccttgtgtgtggaacacatcctccatatagccacactactcaaaattcactgtctttaagtctttactcaaatgcttctccgtgaagccatccctgagccctctttaaaattgcagccccccactcctgtactccttattgtctctcatttttaatttttgttattgtagttagaaccatctgacacatagcttttattccattggttttttgttatgtctttctttacaagaatttgaagtccatcaggccgggagttttgtttgttgtgtttgctgctatctcccagtgcctaaaattgcctggcatacagtaggcatttaataatctttgaatcagtgaaaaccagatggtggcttggcatttccacataggaatgagccaggtggaaatcatccaggatataagtagatcttgaagtgataaggaagggtcatcataatcatgtggggcccattttgccctttcttgtttcttttctctaggctcagcaacagcctcaccaaggactccatgaatatcaaagcccatatccacatgttgctagaggtgagagcagctcaccccactaccagactctgtgtttagggtggtgacctgaagaaggaagagagcgaaagaagggaaggaccatctttccctctaaactggagtcaagggagggaggtcagagcaagcctgggggcgtaacccagacccagtctttgttcaatctcttctgtcctctttttcaggggcttagagaactacaaggcctgcagaatttcccagagaagcctcaccattgacttcttccccccatcctcagacattaaagagcctgaatgcctttgagtcacatggcccttctttttccccataaaccctgctagttgccacgggggcctgttcctagggcacaaagttactgagagacccagagatccagtctctctgtggaacctccaaaatgccccagcagtcctgcctccagcctgttgcctggcagtatttgccagttgaccttatgcactgccctctcttctgtcatcttggcaacctgggccccccacctcaccctttcttccattccttttcctagacgccaccctttgaattgccatagagaatgggccaattcatggtggaggtttgttcattcccacaacaatcaaagggccctaaggtttacgctttcacacacccaatcattccccaggtaccccaaattacacccaaaccctaactcagccctaccttgtcttagcccctgcttgtaagtgttccagcttccaatgggcacagacctggatcccgctctccctagtcgggcccctattctaggttgagtccagccaccgccaatcaatgcagagccaggttcctcccctttttaactctggccgcagttcaaccctgccctctgaaagcatttcgtttctgccactcaatgctctttcgtgtgcctgacagccatcctgccctcctacctccgctgtgttctaaattcgtctttacccagctctatggtcttgtctaaccgtagagctgccctgcccgcctacgcggagcccagtccgacccactcccgccggctgctacgcccatttctatacaagccctgcttccgctgagcagcatggcgtgcgacaccgcccccttggtgttttggcaggggtctagaagtccctcgtccgccaatcagagaaaaacagggccacccacccccgtccttgggggctgtcttccatcaatcccatgtaagccaatcagtgtgaggcagacccccgcccccccgacacaggccccgagccttttcagttgctcacagtccgtcagtccttgagccaatcggcgtggagcaccgtgaaggccgaacgcgcctcctcgggactccaggggccgtgagcgttccatcatttccccttacgccaatcacggcacagctctgtagggaagggcccgtcccccaacccctcgaggccttgcggccgattaatagcgctttggccaatcagcgagcggcgggacattgggctcctcctcctcgggcccacgtgagctgtagggaaacgcaggggcggcttctaggtgctgccgccgccaccgccaccaccacctccaccgccgcctcggaacccaggcctggggggcggtggggccgcgtatggagcccccgccccccggagctgccaacattgccaacgccaccgccacgctacacacaggtgagctctgggcctggagggtggagggcccagtccgtgaccccacgtatccttcccgcccccgcgcagaggatgtggcttggccggtggcctgctggtgttcgactccccgccgccaccaccacggctggtggacctgcgtgtggcattgctcaagcccttcgtcccttatagtggatctgaccgtggcctaacctccccctcccgttgtataatggatcggtctgcgtgcttatgtttttccccacgccaacttagggtggactcgtccataggctttccccctacccctacccccacccgccccccacccacccccacttatagggagctagcctgtgacagtgttcagcccccttaatagtaggtgtatctgagtgtttggatttctcctagcctcaactttcaggagacccgtccgtggccttatttattccacccttcctgtacatcgtagcgaatcaatccgtggcgccgcactcctccgcatccctctttaacagtgagtctacctgagtttgtattcctgcctcctccagtcccccaatgcatcagtccatggcttttttcaaaaccaccccccccccccaccaccaccaccaccattttatagtggatcagtcttcatgtttggattcacgtccctttagctatcagtccattgccctgtctcctctttttcgtagactgtcgctctagcgcttggggttctctcctttttaatagtgggttagtttagtgctttacatctccctattttcagtagctcagtccatagccttttccctctctgctttgaatcagtctgtgtgatggcttttctctcctctcactgtggtgcaggagtctgtaaggttttctgctccccttcccctcagacgatgagcctcatcacccctccctttgcagtggatctgttcattggccttcctcccccacacccctgtatgcttgcacagtcccccgcataccctcccgtgagtccagtgctttgtaattgggggaagatcggccgtgtactttcaatttccttctctttttttttcccttcccagaagagaacgtgctgatcctcttttccttgtgatggagcactgtacggccttccctgtcctccacctcttaatagtgggtcagcctggtcacactcgtaaccacaaagacgttctgcctcactacaataagtgaatacattagcgccagtgatgatagtaatgccaataggagctagcgtttattgagcacctgccgtatatcaggcagagtgtttcatatgaatgagttcctttaatcctcaccacaaccccatgagataggtagtgagggaattgggccatagggaggttaaattccttactcaaaggtggcccaggaagtactcaggacacaggataatttttgaggctcccctcttagatctcatcccaccccacgtgaggcctcagtccttaaaaaccaaattagttctcacctccaagcttttgttcttgctgttccctctgcctgcagagcagtcttcattcctcaccttctctcagcacccacccaccccccaatcccagcagctgtgtgaccttagatgagtgatttaaccacttcctctctgtgcctttttcttcatttgtgaaatgggggatcagaactagaatcccttccagtgtaaataaatattaactgtgaattaatggtaaaacaagtaacctttctagcattaccgcctataccttcccacccccttactgtgctccaaccacactggttccaccacacagctcctcaaacatagcaggcatgggccagcctcagggcctttgcattggctgttctttgtgccttgaacaccacccccagatctctgcatggttcctttcagcactctgttcaaataccaacccccaaaggatgtttaccacactgtggtgtgtggaatgcagtataaaaagatacatgtatgaaagatgtttctaagaatgccagtttatatatgagtaagggttttcctccttttcaaaaggatgtgttcacaagactgaggtacgtaatatgctctgtaaaggcataggtataaaagctgtttctaagagtgctagttgtatatgtgaataaggactgtgttgttgcattgaaagaatgtgttcacaaaactgtggtgtgtagctgggcacaggggtgtgcacttatagtcccagctactcgggaggctgaggtgggaggatagcttgagcccaggagttccaggccagcctgggcaatatagcgagatccctttttctgaaaaaaaaaaacccaaaaaacaaccactgtggtgtgtgtaatacactctcttaaaggcacaggcgtaaaagatgtttctaagagtgatttgattttgttgtacctgggtagtgttatttcattaaaggttgattgtcacaccatggtacttagaatatactatacaaaggcacatgtataaaaaagaagttcctaacaatgctacttgtaaaaacaaaaaaagtcaacccctccctgaccatctgaagctgcacacccagcagggctcaagccaggtccctgatttgtcccgttgccctttatcactgtctgacacactgtgtgggttacttgtttgttgtctgtctctcctcattagaatgtgagtcccatgaggactcagtttttgtctgctcattcaccgctatgtctccagcaactgaaaatgtaccaggtaaacagcagatgctcaataagaatttatcccatgaataaatgggaaaaagataatttgagacaccagtgtaggggtcacatgaggaagaagaagggatatgagagctaattagttgggactgttcctgcaaccaacctttactgagccccttgtgagtaccaggcactcttctaggtgctggaatatggcaaggaacgaaacagggcgaaatatttgtgcttgtggagctgacatttattaaaagttggggaggctgggcacggtggctaacaccagtaatcctagcactttgggaggctgaggtgggtggattgcctgagctcaggagttcaagaccagcctgggcatcacggtgaaaccccatctctactaaaatacaaaaaaattagctgggtgtggcggcgtgcgcctgtaatcccagttacttgggaggctgaggcaggagaattgcttgaacccaggaggcggaggttgcagtgagccaagattgcaccatgcactccagcatgggtgacagagcgagactctgtctcaaaaaaaaaaaaaaaaaaacccaagctggggagacagactatgtgaacaaaataaataagtaaaattagcataatagacaaatgctgagaagaaataatgaaatagggcaggtaggaatcgagtattgggggtggttgaaatcttaggcatagggaaggtgactcttgaattagggcctcacggtagagacggagagagccttaatgtctacgggaagagcataccaggcagaaggaagtgccagttcagaggccctgaggtgggatggtgcctgccatgttcaaggaacatcaaggcggccagtgtggctggagcagagtgcggggaagggtagaaggtgaggtcacacaggtgatgggagccagatagtgcaggtgatacataggataggattgcaggggcagggggagaaggatgacacactagctaatagctaatatctgtggagtatctgccacacatcagaggcacttttctgttcaaataccaacccccaaaggatgtttaccacacggtggtgcctggaatgcactacaaaaagatacatgtgtcaaagatatttctaagaatgccagtttatatatgaataaggattttcctccttttcaaaaggatatgttcacaaaactgaggtatgtaatatgctctatggaggcacaggtataaaagctgtttctaagagtgctagttgtatatgtgaataaggactgtgttgttgcattgaaagaatgtgttcacaaaactgtggtgtatagctgggcacagaggctgaggtgggaggatcacttgagcccaggagttccaggccagcctgtgcaacatagtgagatccccgtctccgaaaaaaaacccaaaaaataaccactgtggtgtgcataatacactctcctaaaggcacaggcataaaagatgtttctaagagtgatttgattttctggcacctgggtagtgttatttcagtaaatattcattgttaaacactatggtgcttggaatatactatacaaaggcacatgtataaaaaagaagttcctaacaatgctacttgtaaaaacaaaaaaaaaagtcaacccctcaagtcttttacagaagtattttacagaattgacacagttaatcctcacagaagccttggagggtaggtgtacttttgagaatatttgactttgagagtaaaatatccccattttacagatgaggaaacaagcaaagagaggctgagtaacttgctcagggtaaccttgagccagaatagccagaacaggggcagaggaacataaggctgaagactcagaaagaagaacagatttgcaagggcaggcaggttatttggcacctttgatcacgcagaggaagaatgaattcttcctggaatgcgatgattgtgtaattgagtccatgaagtgagggaagagctctccctgcggggagagcagcccgtgcttaccctcagaggttggaactgtctcgggaacggtagatagttcagggtggctgcctcagagcctttgtacacgccgttcgctccgcctgaaggccctcccccacagagggcagcctggcttgctacctcccctccttcaggccaggtgtcacttccttggggaagaactccttgtacaccctgtgtaaaaacagcattcctgtcactctctaggatcttacccttctctgtttctcttcatggagaactggtggtgtaaggcgattgctcactagagccaaaccacttaggttttgaattccggctctgccaacttccagctgtgtgacttggggcaggttacttctctgtacctccattgcctcatgtggaaaatgggggaaatgataatccccaccctttaacggtggtttgaggattcaatgagttaaatgattcaaagagtgtgcagcccacggtaaggatcgtatgcctggcttgcatttttaaattattaaaatgtattcatagcatacccgtagatgtctgacaggcctctgaaactgaccatctccaaaactggtgtgacccccctcaaaacttactctcctgcaaggctcccacctcagctgaccacaatgctgtctttgtgggtgattaggccacaaacctagactcaccctggacccttctctcacctcccccgggcatgctatctgtcagcaagtcctattctgtgttcaggctttctccagaccccagctacttctcgccagccccactgctaccaccatcatctaccgcagtggcttcttcagccccaacagtctgttcttctcacaaccgccagggggatcctgttgaaatctcagtcacagcctgtcatccctctgttcacaaccctcttgtggctcctgtctcactcaacatcctgacagcacccgaaaaagcctggctcagtctggcccccgtcactctgttctcctctcccgctgcctccctcctctcccccgaacccatgtcagcctcctctccccatgtcacctgccaggcactctccagccttgggcccttcacaccggctgccgcttccacctggcttgctgctctcagatactcacgagctcagttccttcacctccttttggtctctgcccagttgtcccctccttggcgactactctcccctgactctccatgtaaaagtaacagctctcccctgcttgatttttttcccataacccttaccaccatctgacgcactcttgtacatgtttgccttttttctcatctgcctttcctgctaagatgtgagctcctctggagcagggattgttgtctgttgcgttctcgactgtatccgcagcacctggcccacagtatgcactcaccaaatgcttgctaagtgaaggagatggaaagaagtaaacatatctaagcaaggcagattactagaactcttatgaggggtcaagtgggagaaataacaaaatacaaagccctgtgtgctgttgaagctggaagcccaccgtcacctttcactcagctgataggttctgttgcagctgaaagaagaactggtaaaattgcctgtctttgccaccaggagtcactctgaactctttggacttctgaaacaagcctgcctgcaaaacaaattcagtgaggtctctggtgacaggactctctaatcggacacttcatggctttgtgacttgtataattgaacaggaagctcatgtttatttccagtttgctctcaggaaagaaagcagtaatggggtgacagggaggatcctgttctttgaaggacatgctgagagggaatagtcggtgtgaggggccgtttagcctaatggtgaaatgcttagtcaactggaacctgactgcctggctccaaatgctggctttgccacatgtggcctgtggaaggtacgtagacatttgtgcctccgctgcctcatttataagttaatgacaggaagactacctacttctcagaggcatgatcagggataaataagtcaatgcccattaaaaaaaaaaataacagtacaggtgtacatgcccttacccaaaacccctggggccagatgtgtttcagaatttccatttcttcacatttcagaaaggtaacatgatgcatatacgatgttacataacaccccttagtaagctctgtaatcggctgtgttcatatttctgcagcaaaatgtatgaacactcgcaataagtgagattcaataaagaccagaaagggccttgtttcatttcaaatcaggttttgccaccaaaagagttaaaagaagctttctgcccttagagcattttggatgttggaatggcagataagggactatgaacaaatcagaaactaatatttagagcttatcatacacctcaggcatataatatttaatctgtacaatatctctgtgaactaggtattgttatccccattttactaatgggcatatcattatccctgttttacacatgagaaaattgaggtacaaagaggttaaagaatatcagccaagcgtggtgcctcatgcctgtaatcctagcactttaggaggccagggagagaggattgcttgagcccaggagttcaagaacagcctgggcaacatagtgagaccccatttcttaaaaaaagaaaaagaatatgcccagggtcacacagctaataagtggcagaaccaggattcaaacactggcaatctggccctagtgcctgggcagttgtccagcaggccatattgcctctctgcttagaagagtgcctgatgtgtattaagctctcaatagatgttaattattgctgtcatcaagaaagagaatattcagggccgagcacggtatctcacacctgtaatcctagcactttgggaagccaaggtgggaggtgggtggatcacttgaggtcaggagttcaagaccagtctggccaacatggtgaaaccatgtctctactaaaaatacaaaaattagccgggcgtggtcgtgggtacctgtaatcccagctatgcgggaggctgaggcatgagaatcgcttgaacctgggaggcagaggttgcagtgagtcaagattgtgccactatactgcgctccagcctgggcaacagagagagactccatctcaaaaaaaaagaaaaaaaaaaaaagaacgagaacattcagggacagtaacaggacagagagatcaggcattcattcagttttaggacggcttcataaaggaaaggacctttgggctgggacttgaaagataagaaagactgctaggcgaaagaaggaagccccacgtggagtgagcagcctttgcaagggtctggcaaaaaaaaaacctcctgaaaaacttgacattgatatggtagaagatacagataatattcaaatgaggaggatggaactagttttctattcttgctgtaacaaataatcacaaatttagctgcttaaaacaacacatttgttatcttacagttctgtaggtcagaagtcccacactggtctcagctgaaatcaaggtattggcagggttgcgttccttctggaggctctaggggaaaatccatttcctgctcattcaagttgttggcagaatccaattccttgagattgtaggactgaagtccctgtttccttactgtctgtcagctgacagccattcccagctttaagaggctgcccacagtccttgattctgagcctccttcctccatcttcaaagccaacaatggcaggttgagtccctctcacattttgaatctcccctgcctcttctgtcatcacatctctgagctacctttctttctccatcatctgcttttcagagctcatatgattagattgaatttcatcaaataatccagaaataatctccctgtcttagggtttgtaaccttaatttcatctgcaaagttcctttctgctatgtagtgtaaataacatacaggttccgaggattaggatgcggagcagggttggcatcatttggcctaccacagtctgccctctgacccccacagattcacatttgtttcacattcaaaatacattcacaccatcctaagatacccatgagttgtatcccatcacagggagcatcccaagcaagactggggagctagaagttagtctgggaaggtttagggaatgatggtagggtttgaagacagagatggagaaaagatgacaaaaaaaggaatcctcctcccgctgacctctgcccctcctatgtccacagcctctcaactcagctgtttgctctccagg

SEQ ID NO: 12 - DNA, 2240 bp, Homo Sapiens
attgaggactcggaaatgaggtccaagggtagccaaggatggctgcagcttcatatgatcagttgttaaagcaagttgaggcactgaagatggagaactcaaatcttcgacaagagctagaagataattccaatcatcttacaaaactggaaactgaggcatctaatatgaaggaagtacttaaacaactacaaggaagtattgaagatgaagctatggcttcttctggacagattgatttattagagcgtcttaaagagcttaacttagatagcagtaatttccctggagtaaaactgcggtcaaaaatgtccctccgttcttatggaagccgggaaggatctgtatcaagccgttctggagagtgcagtcctgttcctatgggttcatttccaagaagagggtttgtaaatggaagcagagaaagtactggatatttagaagaacttgagaaagagaggtcattgcttcttgctgatcttgacaaagaagaaaaggaaaaagactggtattacgctcaacttcagaatctcactaaaagaatagatagtcttcctttaactgaaaatttttccttacaaacagatatgaccagaaggcaattggaatatgaagcaaggcaaatcagagttgcgatggaagaacaactaggtacctgccaggatatggaaaaacgagcacagcgaagaatagccagaattcagcaaatcgaaaaggacatacttcgtatacgacagcttttacagtcccaagcaacagaagcagagaggtcatctcagaacaagcatgaaaccggctcacatgatgctgagcggcagaatgaaggtcaaggagtgggagaaatcaacatggcaacttctggtaatggtcagggttcaactacacgaatggaccatgaaacagccagtgttttgagttctagtagcacacactctgcacctcgaaggctgacaagtcatctgggaaccaaggtggaaatggtgtattcattgttgtcaatgcttggtactcatgataaggatgatatgtcgcgaactttgctagctatgtctagctcccaagacagctgtatatccatgcgacagtctggatgtcttcctctcctcatccagcttttacatggcaatgacaaagactctgtattgttgggaaattcccggggcagtaaagaggctcgggccagggccagtgcagcactccacaacatcattcactcacagcctgatgacaagagaggcaggcgtgaaatccgagtccttcatcttttggaacagatacgcgcttactgtgaaacctgttgggagtggcaggaagctcatgaaccaggcatggaccaggacaaaaatccaatgccagctcctgttgaacatcagatctgtcctgctgtgtgtgttctaatgaaactttcatttgatgaagagcatagacatgcaatgaatgaactagggggactacaggccattgcagaattattgcaagtggactgtgaaatgtacgggcttactaatgaccactacagtattacactaagacgatatgctggaatggctttgacaaacttgacttttggagatgtagccaacaaggctacgctatgctctatgaaaggctgcatgagagcacttgtggcccaactaaaatctgaaagtgaagacttacagcaggttattgcaagtgttttgaggaatttgtcttggcgagcagatgtaaatagtaaaaagacgttgcgagaagttggaagtgtgaaagcattgatggaatgtgctttagaagttaaaaaggaatcaaccctcaaaagcgtattgagtgccttatggaatttgtcagcacattgcactgagaataaagctgatatatgtgctgtagatggtgcacttgcatttttggttggcactcttacttaccggagccagacaaacactttagccattattgaaagtggaggtgggatattacggaatgtgtccagcttgatagctacaaatgaggaccacaggcaaatcctaagagagaacaactgtctacaaactttattacaacacttaaaatctcatagtttgacaatagtcagtaatgcatgtggaactttgtggaatctctcagcaagaaatcctaaagaccaggaagcattatgggacatgggggcagttagcatgctcaagaacctcattcattcaaagcacaaaatgattgctatgggaagtgctgcagctttaaggaatctcatggcaaataggcct

SEQ ID NO: 13 - DNA, 8169 bp, Homo Sapiens
  unsure (2047, 2136, 7481, 7492, 7502..7503, 7505, 7511): unknown base
ggaactacatggttcttagtaacagcatgctgttacttaccacagtaactttttctggttatatggaaaaattcagacatatcaagaaaagccaagagcacaaaattaagttatactggagaaaaacgctgcttttctacgccttcaagataaatattctaatgtcaggccaaaacagcaatgttagaaccaaaaaaagccaaagaggagaataatcatctcaggccttctccaggggagaaaaaaatgaaggaaatgacatattgacctgcaaatcatgtacagcaagaaactgtaaaagatgaacttctgcaatatgaatttgagaaataaaaaaaaaaaaaacaactgtacctcaaggaatgaaattaccactttaaatcaagaagacaacatttttaacccaaaactaggaaaattaaatagatgtcaaggagaagatacctgtttaaaaacagagtataaatttaaaaatcaaaaccccttaaaattttattaaaatcagataatacttcaagaaatcttgttgttttaaatataaggaaccagactctggttctgtatcagtgcctgtcccctggtcccctacctgagaacgtttaatttttagaaaaacacacaaacaatttgtttttaattccagccaagtcaataacacataaaacttcttttattagctcatcctttattagtcctcttcaactttagaccttttattttcctaacccctacctcttagtcctataatttttctttttttaaaaatgtgggataaccaatcattttatcttatctgactatgatacagacatttattttgtatatatgatttaacataaaattttaagactttaaattacatgagttcatttataaacatttatttcatttacagttaatttattttttaacaattatacctatatttcttacaaaaattgagatattagatggagctggtcattatttcaagtttttttaaattaaataattatatagcctgttaacatgaggtgtttacccacataagagccataaagttaaatacatgggtatctgtagataactcagaaaatacaacttttgtttttttccttagaggcaaaggctcactctgttgcccaggctagagtgcagtggtgtgatcatagctcactctagccttgaactctgggctcaagggatcccccctcctcagccttaagagtagctgggatcacaggcacatgcctggctaatttttaaatttttttatggagattgggtcttgttatgttacccaggctgatctcaaactcctgggctcaagtgatcctcccaccttggcctctccaagttttggcattgcaggtgggagtcactacccagccacagctgtttttgttaaataatattaaattaatcttatttatcaaagaattgcataaatatatatcactttgctttaggcctggtttatagcttcatgaccttaatagcacaggcaaatataaaactgaccagtgctggtgctcagaaactgatatgccaaaacatggtatttgacacgctaaactaaagaagcctcaaggtctctctgacttttcctccaaccccaccatccttcccaaagaagctgaagttcctttatctgcctaacaaccagacccaccaaggagagcaattgttggttctcctcctcctgttatctcatctgttaaagaaaagaagaccaaaatgtaaccacacccaagcagacctttatagaagtacaatgactgcctccaaggattatttaaattccaaagaaaactatttacaagttaatatctgttgctcaatccaatcattctctcaccaatcattcattgcccctcaataaattcctcttctcctcccataatctgttttaccagaatccaagccccccattctttctgtaatttcaagactagtgtataaacttctataactcattgagtcaggatttccagcaatcttggggggcgagagcatagccccaacacagtaacacagcaaaatatttatgacatgtagaagacgtttntatttattttatcaccaatataaacccattactttttaaagaattgagtcacatgacctaaaaaaatagggttaattactatgttttgntgtggtgcccatctatttaaaccaatcagattaacatttcttaagggattgtggcctaccacactgaatcttattatgtagacataacatacaacataatacatgtacatatgtgtaaatatatttaaacaaatatacacataaaggtcttctagcttttattttagaattttagttgtgagatagtaaaacatataaacttgctggtttatagagaacagttggatccaaattatttttctggtaaaatgagataaaggctatgaatcaaattttggtaaaacagtttgagttaattaccagtgcagggaccaaagggaaacttcagtgaaggctcactgaaaaatcaacctgcaaaaggcagattaattggagaaaaagcatacaaatgtatttaatatgtatacatgggagcctgcagaatgatgacccaagcatatagaggaaattgtctatttttaacttaggattaataaaatatagacagccatgtagaaatatgattggacagaaagagtatgagctaatgccaataaaatgagtggggaaacccagtgaaaaaagccaaactctgtaaaatatttagaggtttattctgagccaaatatgagtgaccacggcctgtgacacagcatcaggaggtcctgagaacatgtgtccaaggtgtttggactatagttttcttttatacattttaggaagacagaagatacaggcaaaaacatcagtcaatatatgtaaggtatacattggtttgacctggaaagccggtacattttggaggaggaggggtttggccagtggtggcaggagggaggttgtggaagccagggttcttgttacatatgtgaagcctgtaatatgcttcagaaagaatagatggcatatgtacctcaaaaggtaaatgaccttaaacggtgtcagactcttagttaaatctctcccggatcagagaaagacctggaaagggaaggagattgtccacagaacacaaatttccctcgcaaaagatagctttgcacaggaccattccaaaatatgtcagaaatatattttggggtaaaatactttgatcgcccttagggctgctacctgtcatgtgatgctatgaccagaatcaggttggaatttgttttgagacaggttctcactttgctgctcagcttggagtacagtgcctctgatcacggctcactgcagcctcgatctcccttgatgtgggaggctcaagtgatcctcccacatcagcctcccaaatagctgggactacaggcggccaccaccacactgggctaaatttttttaaagtagagacaagttctccccatgttgcccaggctggtctctaactcctggcctcaacctccttattctctaggattacaggcgccaggctagacctcacaggtctttagacttctacgcaccaggtacctggtagggggagggattatagtggcagaagagcagtaccagtggcccacaccacacaccctggcctcagctggctggggcacacaaaaccaggtgctaccgtcaacgactaggcccatagggtactgctgtcaaaacctgctgccaacaacttccacacactccccaaaacgctcggtaggcggtggtgcgcactttcaatgcatccgccgccagcttcacaggcaagggagaaagaagccagacggagctcggagatgtggagggcagacgcaggcgcatttggaaaagggactggcggtgggaggcgcagagggaaaaaggaacgacacaatcgggcttcctagccgctggcgaagctcgatggggcgtcctgcgagggttcggcgagggttctgccaggatagtagcagtgcgcccaaggagtgagaggcacccggggctactggagccagaccctcaacccgccctagtgggaggcgaagaacaacgaaagcctcgtattcccatttctctaatggctaatgacattaaaggttttcatatggttatttgccatctgcatatcttcagtgaaatgtctgtttatgtcttctgactattttctaattggatttttaaaaataattgatttttgagttatttacatattctagatactggttgtatgccagatatatggcttgtaaatattttctcctaggtaaaccttttcagtatcgttacagggtctttcacaaagcaaaagttttaaatttatggagtctaattcatcaacatttctttttaccggtcttgccactaatgtcaatttaagaaccttttgcctagccttagacaatagtttgttgttttttaaaaccgttttgtaattttactcgtcacagttatatctagccacttaatttttatgtaagggttatttttggcgggggggaatctatagatgtcctgtcttttcagtatcatttgtggaaaagattatctgtcctgcattaaactgcttttggactttcgtctaaaatcagttggaccggtttttgttggcaaagttttgcctgaagcttattccaacaggtgagaaaaagtccacagtttaacagttcctccccaacctgtaaccccgccttgaacttctggactagcccctcgattgttgtagatgccaagcggacctcgcgccgctctgcgttgggccagcccctcacggctggtttcttaccacgtattgcgcaagcggaatctatgcctgttacccacactccctgcgcccccgcaccccgctcctgtgcgcaagtcggaatataaaaccgcggaggagtgagctcttggggtgtccagttggttgccgcggcagtctctccgagcagcgcatttgtcttctaggctgcttggttcgtgcctccgagaaaggtaagtctttctttcgcttttttaggggtacttgaaaacaacaagtgccagacaaagcagcagatgctgttgcgcagtagaagtttatgggcgagttgtccctgaaactggaaccaggtctttcttggcgcgattacgcaagaaccacccgcagccctgcgctcctggcaggtcctgcaactgcactttggatagtcccgttgggaagctagcactttttaatatagaagaacgaggtttgataagtgtgcgagcttaaaggttgacacagtgtccactattacagctgcgtaggtagctagtgttcaggaagtaatagtggagtcatgtagtgtgaaagtaagattgaaatgggcgaggagggtagcagccgccacagccaccagagagaaacctgaccttgcaggtgcgtggtgatgtccatgagccaggctggtgccgcaacagcagcggcgggaccttgagctccgcacggccgctgggtttggacgccctctggttcctggaaactttcacctccccctcagcctgaggccaggtggcctgggaaggtggaaggagtgtggaggggagtggggggggggggggtccactgcctgagaatgagaattctcttcacatctggaaacttcagttatcacgtgtgtcctttaccaattttttttcttttattttctttttgatagagacggcggtctccctatgttacccaggctagtcttgaactcctgtgcttaagcgatcctcccaccttgacttcccaaagtgctggaattacaggcatgagccaatgcgcccggctgctttaccaattttctatgaatgaatttgtacatacatcccctagagcaggaagtaatgtaaaacagaataattagtaatgcacatttcctaatgtgggatgttggtggccaagagatatttggtctttactggaactcttgatactaacatggagtttataatagttgtggagagtgcagacaaggctaggatttctgtgactagagaactcttagtgcgtgaagacctaaggaaagctggattgttgatttttgttaataaataagatgtgaaagattgcatcactgtagcagaaatctcctagttttttaagctaaattctattaaaggtcatcattgctaaaggaattgtgcccaggatttggatagctgatgtcattatttaatattagatgatatcaactaaccacatctcatagactggaataaagtgctagattttacctgaaagctgcaaaaatgaatggtttagatatatgtatgtatttattttatatcaatttccccatttactgtattaacctccctggccccctttaatcaagaatataaaatcatctacttaaattttgccacttaagtttagaacactcttagaatcacactatcttaaagaagccagactagaattagaagcaagttaagtctgaagatataacaaccagcaacaacatttttttttttcaaatgaaaactctaatatggggtgggtatgttgtgtcacacctgtaatcccaacactttgggaggctgatgcaggaggatcacttgaacacaggagttcaagaccagcctggacaacatagcaaaaccctgtccctacaaaaaataagaaaattagctgggcatggtgtcacatgcctgtagtcccagctactcgggaggctgaggtgagaggattgattgatcccaggaggttgaggctgcagtgagtcatgatcgcatgactgcactccaacctgagggacagagcaagaccctgactcaaaaaaaaaaaacaaaaaaaaaaaaaccaccaccaaaactctaatatggacatattactctctcatgggacttgcacattctaaaaagggtccttttccccagtactgggagagtatgtgttcaactacgcagccagcaagacaggctagtttatatagggagtgtgctattcacaaaaagcctctcttctctttctggtattgtacatgacacaatcatagctgtacctgaagagaagtgcattttaaggaccatcatcacctagaaacatgtataaatttctatacctagtgccacaggaatgacattgccttgtactattcctacctctgtccagaggccagctatgtggtctgtctgcatggtgcctagaactttttccatctgacctaggatgcttctgaagcagtccccctgggcagctgtctggtatttaggatatacctgtgagaaaagtttcttacaaacctaatctactatgtttattcctgaactcaaaaagttcattgactgttcaaatcctgaaattttctctatttccataaggctgaattaaaagtactttgttaaaggtagtagccatggcaaaagaaaaaccactgttctgtagaaaaactcattcaatatttacaatcttttctaatcagagattagatcctgaagagaaaggttcatatatatatatatatatatatatatatatatantcttgtttttnctttttgttnntnttttcncacccactgtcattgtgactaaggattcatgaactaagacccctccctcagctcttggtggcacatggtgacagcatgctcagagcaaaggtgctccccatgcctcttctggggctgcactgactgcaggtacctcccctctctacatcccacaccactgataccaaaaaccccctcctttctcctgtactgatgactctgtagctttaaccagggcggcggtgtcactctaaatgtcaccttggcattcagccccatagagtggggaaaattccctcacctgtttctctttgactgttcagtcctcttcaattaaaatcttaattttacaagcgaggaaatgagagtgtttcttgtaggggtgtagtgagaatttaataaaacagtttaaggaaagaaaacaaaaggtagtattgctgcactttctagatggtaaaaagcaaaccaccatgtctgtttaatatatatcacctgctggtccctcggtctagcaggctgaactgtgtgcctgggaattttcttctcgctgtgtgcacccctttacgtcacagggtggactctcttcagagtcctagtggagcagctggccaggctgacatgatctgacaacattgtaggttaccactaccatctctcaccgtctcactttcttcctagg

SEQ ID NO: 14 - DNA, 2501 bp, Homo Sapiens
tcacacggccagaaagggtccaggcggttcccggcgcttttccagcccttgttttcatggcgcaccctcccgccagccgcccccctccgcactccgtcgtccgcccggcccggccgcgtgcggttccccgggagcccccaccccgtcgcggaccccagcgaccaccaagtccgcacgcggcctgccgcaggcctgagcagaaggccccgcgcacacccaccgcgccgcggccgcgcgggaggcctgtgccgcccgcgccacccactggccgggccccgcgggcgcagcggagcgggcgggtggccggcccggacgcgccctccccggccgcggccccgcgcgccatgtgcccccggcgggacgcgccactcccgggcctgccgcggcgcctttaacccgggccagggagcggggcggagggggcggtcgggtggctcagaggagggctctttctttcttctttttttgaatgaaccgtgtgacgttacgcacaggaaaccggtcgggctgtgcagagaatgaagtaagaggacaggcaccacagccccgctcccgcccccttcctcccgcgcccgcccctccgcgccgcctgcccgcccgcccgccgcgctcccgcccgccgctctccgtggccccgccgcgctgccgccgccgccgctgccagcagaaggtgccggggctccgggccctccctgccggcggccgtcagcgctcggagcgggctgcgcggcgggagctccgggaggcggccgtagccagcgccgccgcgcaggaccaggaggaggagaaagggtgcgcagcccggaggcggggtgcgccggtggggtgcagcggaagagggggtccaggggggagaacttcgtagcagtcatcctttttaggaaaagagggaaaaaataaaaccctcccccaccacctccttctccccacccctcgccgcaccacacacagcgcgggcttctagcgctcggcaccggcgggccaggcgcgtcctgccttcatttatccagcagcttttcggaaaatgcatttgctgttcggagtttaatcagaagaggattcctgcctccgtccccggctccttcatcgtcccctctcccctgtctctctcctggggaggcgtgaagcggtcccgtggatagagattcatgcctgtgcccgcgcgtgtgtgcgcgcgtgtaaattgccgagaaggggaaaacatcacaggacttctgcgaataccggactgaaaattgtaattcatctgccgccgccgctgccttttttttttctcgagctcttgagatctccggttgggattcctgcggattgacatttctgtgaagcagaagtctgggaatcgatctggaaatcctcctaatttttactccctctccccgcgactcctgattcattgggaagtttcaaatcagctataactggagagtgctgaagattgatgggatcgttgccttatgcatttgttttggttttacaaaaaggaaacttgacagaggatcatgctgtacttaaaaaatacaagtaagttctctgcacaggaaattggtttaatgtaactttcaatggaaacctttgagattttttacttaaagtgcattcgagtaaatttaatttccaggcagcttaatacattctttttagccgtgttacttgtagtgtgtatgccctgctttcactcagtgtgtacagggaaacgcacctgattttttacttattagtttgttttttctttaacctttcagcatcacagaggaagtagactgatattaacaatacttactaataataacgtgcctcatgaaataaagatccgaaaggaattggaataaaaatttcctgcatctcatgccaagggggaaacaccagaatcaagtgttccgcgtgattgaagacaccccctcgtccaagaatgcaaagcacatccaataaaatagctggattataactcctcttctttctctgggggccgtggggtgggagctggggcgagaggtgccgttggcccccgttgcttttcctctgggaaggatggcgcacgctgggagaacagggtacgataaccgggagatagtgatgaagtacatccattataagctgtcgcagaggggctacgagtgggatgcgggagatgtgggcgccgcgcccccgggggccgcccccgcaccgggcatcttctcctcccagcccgggcacacgccccatccagccgcatcccgggacccggtcgccaggacctcgccgctgcagaccccggctgcccccggcgccgccgcggggcctgcgctcagcccggtgccacctgtggtccacctgaccctccgccaggccggcgacgacttctcccgccgctaccgccgcgacttcgccgagatgtccagccagctgcacctgacgcccttcaccgcgcggggacgctttgccacggtggtggaggagctcttcagggacggggtgaactgggggaggattgtggccttctttgagttcggtggggtcat

SEQ ID NO: 15 - DNA, 6277 bp, Homo Sapiens
gtgcgccaagatcatgccactgcactcccgcctgggtgatagagcgagactctgtctcaaaaataaaataaaaaattggcccggtgtggtggctcatgcctgtaatcctagcaatctgggaggctgaggtggaaggatcgtgaacctaggagttgaagaccagcctgggcaacaaagccggaccctgtctccttaaaaaaattaagttcaattaaacatttttaaaaataataaaccagtcattagaaccataaacctgtactgtttttgacaatgtaatgcactgccctgtaaaacactacaattaagactgttattttaaggaccctgaagtctgtgaagatcaggcacttttttgaaaccctaagataattatcccccagttttctccattctttgtttctacctagaaccaagttcaccaccaaaacgcagtcctgctgacgtcaagtattcattcatatgacatgtaattactggggtcgttaaaatttgggcagaatctttgtcaattcaccaggaccttaggcaaaaaatcaggaaaatgaagtgactgactcagtctgccaaaagcggatattctgaaataccactttccaactttaagaaacacttcctgccaggtgcggtggctcacgcctataatcccagcactttgggaggccgaggaaggcagatcacgaggtcaggagatcgaggtcatcctggctaacgcggtgaaacccccatctctactaaaaacacaaaaaattagctgggcgtgatggcgggtgcctgtagtcccagctactcgggaggctgaggcaagagaatggcgtgaacccgggagacagagttcgcagtgcactagccgcgatcgtgccactgcacttcaggctgggcgacagagcgagactcagtctcaaaaaaaaaagaaaaaaaagaaacacacttccctactcgttagggaaattaatcttcgtctctttttctcaaattacacaattggaaattaatttagatattctggagctcctccagctggtgggccaactaagagaaaacaggaagtgggagattctagcttagctggaccatatccaggtctccataaggaactctctttggctggcatgtaaaaaaattctttcagcaagagcattaatcttgaacgtgtgtaaacacgaaagctatggttaaccctacctgctccttaggtctacagccagtagagtcagatagctgggtcctaggccttcagctttcataattgacattattgttaagtccatgtgactgactcaccttgtcttggcacaagttagcttttcctccacatcgatttttttttctttcagcctcaacaaaatccctttaatgaaacaaacctggcaacccgaactttggttactgtctccaccagaggcctgtacaagccaagttatccaagctgaggccgggagtggtggctcatgcctgtaatcccagcactttgggaggccaaggcaggaggatcgcttgagctcaggagttcaagaccagcctgggctggtctttgagaaagcgagactttgtctcgaaaaaaaaaaaaaaaagtgtggcctgaaagttgagtgtttgacaaaaaggagaaacagtgcctttccaaaaccaaaggtccctaaccaagatctctttaacggggtctcgaaaaaaggagaatgggatgagaaggatatatgggtagtgtcattttttaacttgcagatttcatcctagtcttccagttatcgtttcctagcactccatgttcccaagatagtgtcaccaccccaaggactctctctcattttctttgcctgggccctctttctactgaggagtcgtggccttccatcagtagaagccggatgttcttgtgtccgaaattggtgggttcttggtctcactgacttcaagaatgaagttgcggaccctcacggtgagtggtacagttcttaaagatgatgtgtccagagtttgttccttctgatgttcggacgtgttcagagttacctccttctggtggattcgtggtctcgctggcttcaggagtgaagctgcagacctttgcggtgagtgttacagctcttaaggcggcatgtctggagtttgttcgttcctcccgtctggagttgttcattcctcctggtgggttcgtggtctcgctggcttcaggagtgaagctgcagacctctgcggtcggtgttaccagcagataaatgctatgcggacccaaagagtgagcagcagcaagatttattgcaaagagcacaagaacaaagcttccacagcgtggaaggagaccagagcgggttgctgctgctggctcaggcagcctgcatttttttttttttttttttttttttttgagatggagtctccctctgtcacccaggctggaatgcagtggtgcaatctgggctcactgcaagctccgcctcccgggttcacgccattctcctgcctcaacctccccagtagaggggattacaggcacccaccaccgcacccagctaatattttgtctttttagtagagtcggggtttcactgtgttagccaggatggtctcgatctcttgacctcgtgatccacccctctaggcctcccaaattgctgggattacaggtgtgagccactggcacccagcggggcagcctgcttttattcccttatctgaccccacccacatcctgttgattggtccattttacagagagctaattggtccgttttgacagggtgctgattggtgcatttacaatccctgagctagatatacacagagtgctgattggtgcatttacaatcctctagctagacataaaaattctccaagtccccactacatttgctagacacagagcactgattggtgcgtttacaaacctttagctagacacagagtgctgattggtgcatttgcaaaccttgagctagacacagagcactgattggtgcatttacaatcctttagctagacacagaagttctccaagtgcccaccagattagctagatacagagtgctgattggtgcatccccaaaccccaagctagacacagagtgctgactggtgcatataaaatcctcaggctagacataaaagttttccaagtccccatctgactcaggagcccagctggcttcacctagtggatcctgcgcagggctgtgccgggcgcctgcactcctctcagcccttgggcagtcgatgggaccgggcgctgaggagcagggggcggtgcccgtcggggaggctcaggccacgctggagctcacaggggttgggagggggctcgggcatggcgggctgcaggtcctgagccttgccctgtgcagggcggctggggcccggtgagaattcaagcggggtgcaggcgggccggcagtgctgggggacccggcgcaccctctgcagctgctggcccgggtgctaggcccctgactgcccggggccgggggtgcggggcccgctgagcccgcgcccacctggaactcgcgctggctggcgagcgctgcgcgcagccccagttcccacacccgcctctccctccacacttccccgcaagcagagggagccggctctggcttcggccagcccagagaggggcccccacagcgcagtggcgggctgaagggctcctccagcacggccagaatggacgccaaggccgaggaggcgccgagagcgagcgagggctgctagcacgttgtcacctcgcattctgaaccacagactctccaactctccggcgcttttcgcccactcggtccctcagaacacgaagggctctctcatcctgtcactaaaacgattagctgtccggagacacggaaaaagtcgcccctcttctttgcaggattcctcccttgaacttctccaaaccctcttagtgtgacgtgaccccacccctagctaacccaggctgcttccttaccagcttcccgccccctggggaggcggcaatgcaaagaccgtccgctgccagctctgccgctatctctgtggggtgaatctaacatggcggacaaagacagtaactagtcccgtttctccgcgttttcgccaagaagattggctcttaccacttgtccctcaaaacgaccaccccattgactggtggcgattgcgtcgacggagacggggcaaaagcaagctgaacccgaaaaataacaaacactggggctgaggggtggaactacgagtgcgcagacatgggccagagcgcatttcccctgccccaggcaaattcggcgctcactgcgtccccgcaggccactgaccttacaagactacttgccccagactcctggggctggatgggaattgtagtctccctaaagagttgtacgtatctttttaaggcctagtttctgctttcaaaatacgaaaacataacactccagtccataactgttgacaagtacaagcgcgcacaggtctccaatctatccactggatttccgtgagaattgtgcccgctctggtattggatgttcctctccataagactacagtttctaaggaacactgtggcgaagacctttcattccgcaacgcatgctggaaataattatttccctccacccccccaacaatccttattacttatatttaccgaaactggagacctccattagggcggaaagagtgggggattgggacctcttcttacgactgctttggacaataggtagcgattctgaccttcgtacagcaattactgtgatgcaataagccgcaactggaagagtagaggctagagggcaggcactttatggcaaactcaggtagaattcttcctcttccgtctctttccttttacgtcatccgggggcagactgggtggccaatccagagccccgagagacgcttggctctttctgtccctcccatcctctgattgtaccttgatttcgtattctgagaggctgctgcttagcggtagccccttggtttccgtggcaacggaaaagcgcgggaattacagataaattaaaactgcgactgcgcggcgtgagctcgctgagacttcctggacgggggacaggctgtggggtttctcagataactgggcccctgcgctcaggaggccttcaccctctgctctgggtaaaggtagtagagtcccgggaaagggacagggggcccaagtgatgctctggggtactggcgtgggagagtggatttccgaagctgacagatgggtattctttgacggggggtaggggcggaacctgagaggcgtaaggcgttgtgaaccctggggaggggggcagtttgtaggtcgcgagggaagcgctgaggatcaggaagggggcactgagtgtccgtgggggaatcctcgtgataggaactggaatatgccttgagggggacactatgtctttaaaaacgtcggctggtcatgaggtcaggagttccagaccagcctgaccaacgtggtgaaactccgtctctactaaaaatacaaaaattagccgggcgtggtgccgctccagctactcaggaggctgaggcaggagaatcgctagaacccgggaggcggaggttgcagtgagccgagatcgcgccattgcactccagcctgggcgacagagcgagactgtctcaaaacaaaacaaaacaaaacaaaacaaaaaacaccggctggtatgtatgagaggatgggaccttgtggaagaagaggtgccaggaatatgtctgggaaggggaggagacaggattttgtgggagggagaacttaagaactggatccatttgcgccattgagaaagcgcaagagggaagtagaggagcgtcagtagtaacagatgctgccggcagggatgtgcttgaggaggatccagagatgagagcaggtcactgggaaaggttaggggcggggaggccttgattggtgttggtttggtcgttgttgattttggttttatgcaagaaaaagaaaacaaccagaaacattggagaaagctaaggctaccaccacctacccggtcagtcactcctctgtagctttctctttcttggagaaaggaaaagacccaaggggttggcagcaatatgtgaaaaaattcagaatttatgttgtctaattacaaaaagcaacttctagaatctttaaaaataaaggacgttgtcattagttctttggtttgtattattctaaaaccttccaaatcttaaatttactttattttaaaatgataaaatgaagttgtcattttataaaccttttaaaaagatatatatatatgtttttctaatgtgttaaagt

SEQ ID NO: 16 - DNA, 6104 bp, Homo Sapiens
tagccctgaagcaggcagacatgcccatatcttcctctgagtcagtgcctggatccaggggaccagacctcttacctgacatggcagagagataagctatgtttcaggtcctcaaaaggagcctggaaaatataattaattcaagccaaatactcttactattcccttgcatatacaacaaagataaaaatatctatcttattaaactgttgagagtaagaaagataatatacacacagtgcctggcacacggatggaacttagttgatggtagttataatatttataatatcttttctttgtttcaatttaatatgatttatatgacttttcatacttactgcacatgcaacatcttttagataattctatatctaggttattagtaaaacattgatatcctcttcagtatttatacagatgcccctcttctaaagtcttcagcaaaattcccactggggaatttcagctgtctctcactctttttttttttcacttttatttccatattaaaggtttttatttttaaggtatacaatatgatattttgatacatgtatactttgtgaaatgattgcaacaatcaagttaattaacatatcattacctcacatagtttcctgtgtgtgtgtgtgtgtgtgtgcgcttagagctcttgagatctactctctttgcaaatttcaagcatatgttaactatagtcaccaggctgtatattaggtctccagaacttactcatcttataactgaaaggttgtatcctttaactagtatttctcttttacccccaaccgcagccccaaataatcaccattctaacctttgttactgagttcgacttgttttttgagattctacatataagtgagatcatgtattacgtgtctttctgtgcctcacttattttgtgtgtcataatattccccaggttcagccatgttggcacaaatgacaatatttccttcttctgaataatactgctgactaatattccattgtgtgtgtgtgataaacacacaccacattttctttaataattcattcatcaatggacacttaggctgtttctgtatcttggttattgtgaatctcgctgtctctttggcagccatttctgtactcccttccccagaagcagctttactgcagtctaaaagtgtcttaggaaaatgattcagaagcaactacttctcttggcatgttcttcagtaaacacgatgatggaaagctttgatttctgcccttctttaaacagtgcaatcgattttcagttgggattttttccagttaatttgatagctccacgtttctaccaggctgaagaaaatgtatgtgttgtgggctgttgtattactgttgctggtggtgctgttgctactgctgagattttgtggttgagtccatattataaaggaattgtagagcagtaataaatttaacttgagctctgaactcaagccttcaggtgtgacttttttaatcacgtggaaattcacgtaagaattttcaaccagacttcatgtttatttttatttcttaagcaaagggtacaggaatctggtctaaacgaatgggaacaaacattacagttagactttattggagtgttgtaaaaatgtttttttccaaaatcagattgtttcaaaactgaccctggtttccagatttttaagttaggaagtaagacagtaaaaatcaagggtcaaatagtcaagcgactatttttttaaaatcagcattttccttggcgacttccgttagaccatgctctgtttagtactgaaactcagagaagttccaggaatagcgggatgaaatctaagtgatccgctcacgggaagctctacccttccttcgctcgctcagtaaatccgggatgggctcagagaatgacttcgcattttgcaccagaagatctcagtctttagagagaaccctagacgaaatccttacttccctgcctcattcctgaaaacttctacctgggaaccgacttgctgtgacaaataaaatgggaggagtctggctgaatagtttgtggatttcggaaagcaaagcgaaatgccgctctaactaggtccgaattttctgcaagctaccttgtgaaactggtgaatttgccagaatgaattttcattcatttaactttggcggatcgtctactagggtgcctggcatggtgctaattgctggagaaaatgattttcaaacaaaaacgaaaaaaactttcggcccccagcaaggagccaggcaattcctacaaactcaaggagtgcttgagaggtgagttaatgaccgtccctcctgtcctaaagagacagacttttacagtcagtcttgaaactgctcggggctacactagcgccctctggacgcagactctggttagcgccccacggcaccagcctttgatttgtagctgccaaagatttgatagtggggagtacgtgtctattctgaaggctgaagacacacaccacagtcaggagtagaattccgacccctcaaagtgacatggccacaaaatctgcgtctactggctttcattttgcggtcaccgtggcacgggcgaaagctatgaactctctctttaggaaaacacacatcacagacacacacacttacaaacggtttcaggaggttcttatgttagaaacctctggtcttggaaaaaaatcatttccgctgaagtatgtggtagctgagcgcaaatacccttctgctacagccccagtggcagaggcccaagcactacgccccactcagtgcccgcactgcggccttcgcaactcttcaagcagctctgcaccgaaaacccaggccggagatccgagcctaaactgctgaaaagctccaaggctccggacagggtctcagcaggggttatcttccttcaggatccggggctcattgtgcccaagatccgccatccaagccctgctctgcgcgcacgttgcctgtttcacgctctgcgctgacacgcgccggtgtcctcccgggccagttccagtcccgggtcctgtggccgccctgccggcgaccctgcggagagcgagtcttagatacccagtccccagccccgagttgttattccctcgctgtagttaagaaggaggagatcaattaagggcatcttagaagttaggcgttcccgctgcctcctttgagcacggaggccaccaaccccctagggggaagagatgtagcgcgaggcaggggtgtcgtgctaagaaatttcgacgcttctggggactgaggacaaaggtgcggacacgaccccggggtacctggagttccgtgactcgcgccacggacggcacacctaggggctaatttctgctctgcctcaaagaacctcaagctagagtccttgcctccgcccacagccccgggatgccgctgctgcgctcaccgcacaggcagcgcccggaccggctgcagcagatcgcgcgctgcgcgttccaccgggagatggtggagacgctgaaaagcttctttcttgccactctggacgctgtgggcggcaagcgccttagtccctacctctgctgagctgaacgctcaggcacagtggaactgaaacccggttctgcgggatgtgagagctgttgaggtcacgcgtaattgggtgtgatggagggcgcctgttcgtgatgtgtgcaggtttgatgcaagcaggtcatcgtcgtgcgagtgtgtggatgcgaccgcccgagagactcggaggcaggcttgggacacgtttgagtgaacacctcaggatactcttctggccagtatctgttttttagtgtctgtgattcagagtgggcacatgttgggagacagtaatgggtttgggtgtgtgtaaatgagtgtgaccggaagcgagtgtgagcttgatctaggcagggaccacacagcactgtcacacctgcctgctctttagtagaggactgaagtgcgggggtgggggtacggggccggaatagaatgtctctgggacatcttggcaaacagcagccggaagcaaaggggcagctgtgcaaacggctcaggcaggtgatggatggcagggtaggaagggggaggtccagaggtctggatggaggcttccgcatctgtaccttgcaactcacccctcaggcccagcaggtcatcggccccctcctcacacatgtaatggatctgaagagtaccccgggacagtccggggagatggagattcggaaagtatccatggagatcttacagaatcccctgtgcggaccaggaaactcttgtagatccctgcctatctgaggcccaggcgctgggctgtttctcacaatattccttcaagatgagattgtggtccccatttcaaagatgagtacactgagcctctgtgaagttacttgcccatgatcacacaaccaggaattgggccaactgtaattgaactcctgtctaacaaagttcttgctcccagctccgtctcttgtttcccacgagccctggccctctgtgggtaataccagctactggagtcagatttcttgggcccagaacccacccttaggggcattaacctttaaaatctcacttgggcaggggtctgggatcagagttggaagagtccctacaatcctggaccctttccgccaaatcgtgaaaccaggggtggagtggggcgagggttcaaaaccaggccggactgagaggtgaaattcaccatgacgtcaaactgccctcaaattcccgctcactttaagggcgttacttgttggtgcccccaccatcccccaccatttccatcaatgacctcaatgcaaatacaagtgggacggtcctgctggatcctccaggttctggaagcatgagggtgacgcaacccaggggcaaaggacccctccgcccattggttgctgtgcactggcggaactttcccgacccacagcggcgggaataagagcagtcgctggcgctgggaggcatcagagacactgcccagcccaagtgtcgccgccgcttccacagggctctgctggacgccgccgccgccgctgccaccgcctctgatccaagccacctcccgccaggtgagccccgagatcctggctcaggtatatgtctctccctccctctccctccattcgtcattttctcactccctttcctcctctccctctctctccgttagtctcttcatcagatagtctctgttagtccgcgatttataccaggctcgtgccctaggttggatcggacagtctcaatcccccggctcgctcttcctgctcggctgcggactccagtcttactctctcgcactgcacacaggcttaggccagtctcgggacactcaggctccccagggaccgcgcacagagcctgaggcaagagaaactttccgcagacggtgcgatcagggacggcgtctggagcccagcagtcccagggaaattggttcagaacctggaacagagcggatgggtggcaaataggcacgacgactgagggacaagcagccctaaactgcaagccccagtcacaggctctgggagcaaagagagaaagtcttgggtcccaatttaagagtaaaacttggttcctgcaggggactgaggtgccagcaggcggagcttaggctgagcactaaaattgattcttttatttctcagattccaattgcagagataatctctgtggatagatcccacccctcccaccaaggtgtatgcaaaagccccagaagaggaggacagctctgggtttccttatgggatcagcttctgtgacaggggcctgggagcatgtcctccacagagacctggctaacaggtttatatgtatctgtgtggctttggggagaagggtaggactgagacctcccccactcagctctccctctaggatcgctcctccagctctatcagactgtgcatgctacaggcccactgaacctcccagaagtccactgtgctgatgaggaaacaaaaaagaagagaaatataatgaccagtctgaagccacaaagccagagcgttagaagcaagacagaaaaccaggataggagccaaggtctgtgggctcctagaacttcgaactggcgcaggtggtttatctcattcttcccttgcaga

SEQ ID NO: 17 - DNA, 1630 bp, Homo Sapiens
gagctcgagccacgccatgcccgctgcacgtgccagcttgcgcagcacatcagggcgctggtctctccccttcctcctggagtgaaatacaccaaagggcgcggtgggggtggggggtgacgggaggaaggaggtgaagaaacgccaccagatcgtatctcctgtaaagacagccttgactcaaggatgcgttagagcacgtgtcagggccgaccgtgctggcggacttcaccgcagtcggctcccagggagaaagcctggcagagtgaggcgcgaaaccggagggtcggcgaggatgcgggcgaaggaccgagcgtggaggcctcatgcctccggggaaaggaaggggtggtggtgtttgcgcagggggagcgagggggagccggacctaatccctcactcgccccctccccctcccgggccatttcctagaaagctgcatcggtgtggccacgctcagcgcagacacctcgggcggcttgtcagcagatgcaggggcgaggaagcgggtttttcctgcgtggccgctgggcgggggaaccgctgggagccctgcccccggcctgcggcggccctagacgctgcaccgcgtcgccccacgggccccgaagagcccccagaaacacgatggtttctgctcgaggatcacattctatccctccagagaagcaccccccttccttcctaatacccacctctccctccctcttcttcctctgcacacactctgcaggggggggcagaagggacgttgttctggtccctttaatcggggctttcgaaacagcttcgaagttatcaggaacacagacttcagggacatgacctttatctctgggtatgcgaggttgctattttctaaaatcaccccctcccttatttttcacttaagggacctatttctaaattgtctgaggtcaccccatcttcagataatctaccctacattcctggatcttaaatacaagggcaggaggattaggatccgttttgaagaagccaaagttggagggtcgtattttggcgtgctacacctacagaatgagtgaaattagagggcagaaataggagtcggtagttttttgtgggttgcctgtccggggcccctggcatgcaggctggatggagggagaggggtggggggtggcgggggaccgcgtttgaagttgggtcgggccagctgctgttctccttaataacgagaggggaaaaggagggagggagggagagattgaaaggaggaggggaggaccgggaggggaggaaaggggaggaggaaccagagcggggaggcgcggggagagggaggagagctaactgcccagccagcttgcgtcaccgcttcagagcggagaagagcgagcaggggagagcgagaccagttttaaggggaggaccggtgcgagtgaggcagccccgaggctctgctcgcccaccacccaatcctcgcctcccttctgctccaccttctctctctgccctcacctctcccccgaaaaccccctatttagccaaaggaaggaggtcaggggaacgctctcccctccccttccaaaaaacaaaaacagaaaaacccttttccaggccggggaaagcaggagggagaggggccgccgggctggccatggag

SEQ ID NO: 18 - DNA, 5976 bp, Homo Sapiens
agaggggcacctcccaccccaatctgaaccctatgactgcaccccttgccaggagatgaaagggacaagactgcctgaaggattaatctttagcctccaggcaggccagtggccaaaacacccaggaagtgaaagtctgtcctctgccataaggaaacctggagtctgtgatcccatcatgcggggtctgttatctgccaggtgacagggtctcttatctatctgcggtgatctgaagggcaaggcctctggccaaacatttcttttccccagtgatgcctgaaattccactgttagcgctggatctcagcaagatctcagagaaagctcaactcctggagtttgggttttccccagttgagatgttaggaaagcaatgggccttatcacctgcacggacaggtttgtgtacagtctcaggggattcagggaccccaccagagcccatccacagacaccaggttaaaagccctggacagcatttacaactcctttgaaagaagaaaagtctttctctagagccctctttaaagtgcaaatggccctgggaggttcgaaatgatgagctggccggcatgaaagaattttctccagtagatgcaagagataacctgaggagctttagtggcgggggtgggggaaggagagcctgggggaggggaggctccaggcagctcacaatttttcctagaactggaaagggaatgtattgggccaagagggctaatcactcacctttgcagagtgtttacaagaaccttatgaattaagtgctatcaacattcccattttacagatgaggaaaccaagatggtggagataaaatgacttatgcttctcaactaatggcagagccagaagtgaatccaggctggagtgaagtggctccagtgctcaaatgatcctcctacctcagcctccagagtagctgggactacaggcatgcactgccatgtccagctaattcaaaataatatttgttggggagatggggtttcaccatgttgcccagactggtctcaaactcctgggctcaagtaatcttctcacctcccaactagcctcccaaagtgctgcgattacagttgtgagccaccaggcctgcttaggtatccctgtttgatacaagagaaaacagagggcaggcacagtggctcacacctgtaatcccagcactttgggaggctgaggtaggtggatcacttgaggtcaggagtttgagaccagcctggccaacatggcgaaatcccgtctctactaaaatacaaaaattagccagacatggtgacgtgtgtctgtaatcacagctactcaggaggctgaggcacaagaatctcttgaacctgggaggcagagagtgcagtgagccgagatcgcgccattgcactccagccggggcaacagagcaagaccttgtcactaaataaataaataggaaacagagaagcaattcagtgtgttgcgaaagtcacacagcacctgtcttccacaaggagcccctctgtgttcccgcctcaccctggacacctgatctactgtctttggagcttggagaaggacttgccgagaagtctgaagaatgcatcaggcctgacctgactttgctgcccctaattgttttctaaaatcctttttattgaattatcagagtgtaatggaagagtcgatgagagtcgctgcagagttacgaggccaaggcttgctgggtagaagaaagtaaagccctaaaggctcccagggcccagcgatggtataaaatatgtatttttacataactgagaggaaaaaaataagcagacagtacagccccatgggggaaacgcctctttctgtatttccattatcttgttcaaggcacgatcctagtgggaaaggaaataccggagccttctccctctgagcctcctggtgggttaagagcagagggagccaaaatacgacatccaaaagacctgattggaaactcattaaaattgaggggacaggttgttggggggggcggtgctgggctgcccagaaatcgtctgcatttgagaaattacttgatggactcagaggcacctttagctctgggtgaaatattccaaacatggctttccccaggaggaagcgaaataggggctgggccttttgaaagagtaacccctactccaaatatttattgagcagttgctatgatgagccaagaactctgcttagcgattgtttttgtattagctcatgccaattcacttatacaaaggagaacactgacttccccaaggtcacagggctagtgagtggctgactccacttaatgctgtgtagttctaaccatgcttgaaggataaagggaaaggaggtgcccttgtcggggtagacaagccacccagacgtggctggccacagggagtcagacagggaagttgtctaacctaacatttgcctgtctattctgtttttgtcttttgatggaggacggcgggtgctggagggccactggcccaggacctgagacctttggcccctatctattctatttttgatcctaaaattatttcactggggacagaattctctggagaaggtgatggtggccatggtgtggctgtggcattaaaagccccactctgggggtcagaagatcctgggttttggtctttggctttgacattgacctgcctatgtgacattgaacaagttatttgcaaatcataggtttgggtgaactctaaaggtctcttccaggtcaacatcaaaaaacagactgaaaactgcagctccagctggaagactgggaccacatgagatgaagctgattgttagaagaaaggccctggaatcagagaggttggttccagtcctgcgccacctctcattggcctcaatctctctaagcttcagttgcccatctatcatatgggaataataatacagctcttgggttgttttgaaatgagcttaaatgagctggtcagtggctgggcacggtggctcatgcctgtaatcccagcactttgggaggctgaggcaggtggatcatctgaggacaggagttcaagaccagcctggccaacatgatgaaaccctgtctctactaaaaatacaaaaattagccagtcgtggtggcgcatgcctgtaatcccagctactcaggaggctgatagaggagaaccgcttgaacccaagaggcgaaggttgcagtgagccaagaacacaccattgcactccagcctgggcgacagagcaggactccgtctcaaaaaaaaaagagctggtcagtgtcaaatgcttagcacagagactggcacagtaatcttcaatgtccagcacctattgttactattttttttttttttttttttttgagacagagtcttgctctgtcgcccaggctggagtacagtggcgcgatctcggctcactgcaagctccacctcccaggttcatgccattctcctgcctcagcctcccgagtagctgggactacaggcgcccaccaccacgcctggctaattttttgtatttttagtagagacggggtttcactgcgttagccaggatggtctcaatctcctgacctcgtgatctgcccgcctcggcctcccaaagtgctgggattacaggcgtgagccaccatgcctggccctattgttactatttttacccctcacttctgtacagagcatttatggctcaagaaacatttgtcattttaattgtatgggagtcccacaacagcatagggagacatttctgatcattattcccattaggagggtggagaaactgaggctttgggaggtggtcctgacctagggaatcaatttgctgactcactaacccatgaagctctacagttaaaaaagactagattaaaaaatgagaactcagtaaaggggctgaggcaggaggatcgcctgagttcagaaatttgagatcagcctcggcaacatagtgagatcccctctctagaaaaattttttaaaaaattaggccgctcgaggcagagtgcagtggctcacgcctgtaatccaacacttcaggaggctgaagagggtggatcacctgaggtcaggagttccagaccagcctggccaacatggtgaaaccccgtctgtactaaaaatacaaaattagccggtgtggtggcacacgcctgtagtcccagctactcaataggctgagacaggagagtctcttgaacccggcaggcggaggttgcagtgagccgagatcgtgccactgcactccagcctgggcaagacagagcgagactccgtctcaaaaaatacaaacaaaacaaacaaacaaaaaattaggctgctagctcagtggctcatggctcacacctgaaatcctagcactttgggaggccaaggcaggaggatcgcttcagcccaggagttcgagaccaggctgggcaatacagggagacacagcgcccccactgcccctgtccgccccgacttgtctctctacaaaaaggcaaaagaaaaaaaaattagcctggcgtggtggtgtgcacctgtactcccagctactagagaggctggggccagaggaccgcttgagcccaggagttcgaggctgcagtgagctgtgatcgcaccactgcactccagcttgggtgaaagagtgagaccccatctccaaaacgaacaaacaaaaaatcccaaaaaacaaaagaactcagccaagtgtaaaagccctttctgatcccaggtcttagtgagccaccggcggggctgggattcgaacccagtggaatcagaaccgtgcaggtcccataacccacctagaccctagcaactccaggctagagggtcaccgcgtctatgcgaggccgggtgggcgggccgtcagctccgccctggggaggggtccgcgctgctgattggctgtggccggcaggtgaaccctcagccaatcagcggtacggggggcggtgcctccggggctcacctggctgcagccacgcaccccctctcagtggcgtcggaactgcaaagcacctgtgagcttgcggaagtcagttcagactccagcccgctccagcccggcccgacccgaccgcacccggcgcctgccctcgctcggcgtccccggccagccatgggcccttggagccgcagcctctcggcgctgctgctgctgctgcaggtaccccggatcccctgacttgcgagggacgcattcgggccgcaagctccgcgccccagccctgcgccccttcctctcccgtcgtcaccgcttcccttcttccaagaaagttcgggtcctgaggagcggagcggcctggaagcctcgcgcgctccggaccccccagtgatgggagtggggggtgggtggtgaggggcgagcgcggctttcctgccccctccagcgcagaccgaggcgggggcgtctggccgcggagtccgcggggtgggctcgcgcgggcggtgggggcgtgaagcggggtgtagggggtggggtgtggagaaggggtgccctggtgcaagtcgagggggagccaggagtcgtggggacgatcttcgagggaaggagaggggcatccgtagaaataaaggcacctgccatgccaagaaaggtcgtaaataggagtgagggtcccggggataagaaagtgaggtcggaggaggtgggagcgcccctcgctctgaggagtggtgcattcccggtctaaggaaagtggggtactggagaataaagacatctccaataaaatgagaaaggagactgaaagggaacggtgggctaggtcttgagggggtgactcggcggccccctcccgggagttcctgggggctcggcggccgtaggtttcggggtgggggagggtgacgtcgctgcccgcccgtcccggggctgcgggctggggtcctcccccaatcccgacgccgggagcgagggaggggcggcgctgttggtttcggtgagcaggagggaaccctccgagtcacccggttccatctacctttcccccaccccagg

SEQ ID NO: 19 - DNA, 3486 bp, Homo Sapiens
aactaaagaggatgagacctcttgcttgatcctaggtgaattcttttctgtcagttaggtaggaagtcctgacttgaaaactagttctgggcactgccccctttactgttctctgggtatcaacccctgtccttcaattttagttgaactagtggatggtgataccacaggctcaagacagctgcatttaaatatcagtgaccacaggccacatcaaggaaacatctgcaggcaacccagggcctgggaaggagccattttcagtcacttgtaagacagcaggacctgcagactacagcacaatcaaactcagacaaaaccctgaaccagtgagaaccattaggaaggaaaggaacagaaaatgaaccaacctgagtgttaggagacttgcatctagtcctgactccggtaccaaccgaatgcatgtccctggacaggaaacctctctgagtctcgatttcctccgtggtaaaaaggagagggttaaaccacagggtcccgagggtcccttccagctgtcacattctggagcgtatgagatgaggtaggcacacaaagtggacaagatgtggctaagaaaacaagctacacatcaagctcatctgtagcataggtgcttaagaaaactttgctgctgtgtaatattagaacggaaggttggtttccagtaaaatgcattaactttggctcaaaccaagatgatgggtaccgggcatgggggtggggaggcagttgaagatccactgagctttgtctcagggcagccctgctcatcgtcctactttaccttccaccacggtgctcaagcccacactgagagagaaatttccagctgcaaaagggagaagagaaacgctggaatactagtatcggacgttaggacatggttgtggtgttttaaaaatcatttcatcatctggagtttgaccccgaggggagtattttcacccttcagccctctgaaagcattcactagcatctgaatattgttctgagtttgttggagcagtgaaatctggtgagagagaagggtggaggaaggaaggagctgttgtatttggcggctggactcaggtagaggaaactgctacaatcccgggaaagaacagaaaagtagaaagggacgagttcccacacgcagccaatgtccatggccttaactgtgcttgggaaggaagatcctgggccaggggtgtaccctcgtttttcaaaactaaacgtgtctgagacagctacaaagtttattaagggacttgagagactagagttttttgttttttttttttaatcttgagttcctttcttattttcattgagggagagcttgagttcatgataagtgccgcgtctactcctggctaatttctaaaagaaagacgttcgctttggcttcttccctaggcccccagcctccccagggatggcagaaacttctgggttaaggctgagcgaaccattgcccactgcctccaccagcccccagcaaaggcacgccggcgggggggcgcccagcccccccagcaaacgctccgcggcctcccccgcagaccacgaggtgggggccgctggggagggccgagctgggggcagctcgccaccccggctcctagcgagctgccggcgaccttcgcggtcctctggtccaggtcccggcttcccgggcgaggagcgggagggaggtcggggcttaggcgccgcggcgaacccgccaacgcagcgccgggccccgaacctcaggccccgccccaggttcccggccgtttggctagtttgtttgtcttaattttaatttctccgaggccagccagagcaggtttgttggcagcagtacccctccagcagtcacgcgaccagccaatctcccggcggcgctcggggaggcggcgcgctcgggaacgaggggaggtggcggaaccgcgccggggccaccttaaggccgcgctcgccagcctcggcggggcggctcccgccgccgcaaccaatggatctcctcctctgtttaaatagactcgccgtgtcaatcattttcttcttcgtcagcctcccttccaccgccatattgggccactaaaaaaagggggctcgtcttttcggggtgtttttctccccctcccctgtccccgcttgctcacggctctgcgactccgacgccggcaaggtttggagagcggctgggttcgcgggacccgcgggcttgcacccgcccagactcggacgggctttgccaccctctccgcttgcctggtcccctctcctctccgccctcccgctcgccagtccatttgatcagcggagactcggcggccgggccggggcttccccgcagcccctgcgcgctcctagagctcgggccgtggctcgtcggggtctgtgtcttttggctccgagggcagtcgctgggcttccgagaggggttcgggctgcgtaggggcgctttgttttgttcggttttgtttttttgagagtgcgagagaggcggtcgtgcagacccgggagaaagatgtcaaacgtgcgagtgtctaacgggagccctagcctggagcggatggacgccaggcaggcggagcaccccaagccctcggcctgcaggaacctcttcggcccggtggaccacgaagagttaacccgggacttggagaagcactgcagagacatggaagaggcgagccagcgcaagtggaatttcgattttcagaatcacaaacccctagagggcaagtacgagtggcaagaggtggagaagggcagcttgcccgagttctactacagacccccgcggccccccaaaggtgcctgcaaggtgccggcgcaggagagccaggatgtcagcgggagccgcccggcggcgcctttaattggggctccggctaactctgaggacacgcatttggtggacccaaagactgatccgtcggacagccagacggggttagcggagcaatgcgcaggaataaggaagcgacctgcaaccgacggtaatgaccctttcccaaccatagaatgtgtttggggccccgctttgcctgctggagggtgttaaccttagcttgcttttcggcgtattctgatttagctttgggagagctaactttattggtcttaggtgttcagtgctacctggcccactgcttgtctgtttgtgacttttaagtcagaaactggagatggtaagatccgataatttccctaacttaatacatcgcggtccctctcactagcaactcctaggtatgtgacaaagttgggatgtttatcaacggtccgcctcctggctagggaaagagctctggggcggagaatgcactttctgttttttgaaaacaacctcattttgtgcccttaaaagccactggggatgacggatccaggattgtgggtggaggtagtgggtttttcatcccctgactatggggccaacttctgccagccattgttttttctaataaagattgtgtgttctttttaaaaatttcccctgcgcttaga

SEQ ID NO: 20 - DNA, 8666 bp, Homo Sapiens
ctgcagggctttctttagtttaaagaaagtaatcaggtgtccctactgtgtcatgatctccaccctcagctgggttctccagtctggttttaaagaacaaaacaaaaggcttctctgtctgagtcttactcaacccatcctctctactcataagaggtattccaaacctttacgattctcaaacttcctaaccgaccatcttattttcactctgcaaacaagctaacctcctcattcatagaaggaagtgcctcaacttcctccccgttctgaccttttctccctcccaaatctatgtatctcttgtgacaaaatctataaccaccgctgtactttgagttctatttcttcattatttttgagggacctcaagtcctcaaaaatatcctatcttgcctgtgtacttaacttttcttttattcttttctaactttcccttctcttcacttggcacttgcccttccaggtatatgtgtgctcaggtctcctccaccttccatctgcctcacttcatggcatagggccttgaactatcacaaccaagctatgaaagagtagtcaacgcagtgtccccacttccttgccatcccattatcctagtttttcttttggctctctgaggagtccttcacaggctggttttcaggaataagtctaaatgaattactttcagttttcctaaacttctatgcctttgcacatcctcttacctctgcctagaatatctttctccttcttttccatctttaaactctcacatcattcttcaagactgggatcagctctcagcatccggaagcctttgcctactagagacaaatgagaatgagtttggtcaccttttcattttcttgtatcattctgtgctttattttgctcttctaagagcattacatgcttcatttaatccctaaacaactgtttgaggcaagtacagttattatcctaatcatgcaaatgagaaaacagaggcccagacatgttgagtaactttgataaaagttaaagaaccaataagtggaacagttgaggtttgaaccctggcagtctgactgtagagatactatgtttgacctactcccctctgcccccaccccatgtctgcccttagtttctgagcttgttgaatgaatgaacaggtggtagtctttttttgttataagactgatcagaattaagacaggtttaaatttcacgtgtagaattttcaaaactgcaaaggcagtgcaaatctaaaaaaagaatggcattctcaggaaagaggaaaagtaagtgtgagaataataataacaataaccaacaaactttagtaaatttagtaaatgtagtaaatttttacattaaaagcttttggacatacattatcatattttatggccacatgaaatatattataatcccattttgcacataggaaatctgagactggcataaggagcacagagatccaggactttatattttcattcttctaggattttgcacctcaggtcgatatgtatgagtaaactgggagtataatgggctctttaacagaaaaactaggaaagttttcccactattattaattatttacataatatttttttaattttattattatttatactttaagttttagagtacatgtgcacaatgtgcaggtttgttacatatgtatacatgtgccatgttggtgtgctgcacccatcaactcatcatttagcattaggtatatctcctaatgctatccctcccccctcccccctacataagatttataatggataatggacttcaatttctagagcaaaatggccccacccaaggatgccataatccttccagagctctactgcaagatatgagatatacatatctaaaacttgttcttggtatttccaaagcagtcaacttttacacctgtttataatgcatccaaatgttgtttttatatggttgcatctcccatcttcttcaccaatagctatatatatttttcacaagagctgaaagagttcttgatgtaggaatccatggtagagtttcagagaaatccctgaattcactgaaagttttatctagaaatacatgtgcaagtgaacacatcttttttaaaaaaaatcattacctactttcttttttgagaagaaggtatttatttcaacagactcttgaaggagcctactcttcccactctcccacccccattaagaaccactgtaggccgggcacgatggctcatgcctgtaatcccagcactttgggaggctaaggtgggtggatcacctgaggtcaggagttcgagacaagcctagccaacatagtgaaaccccgtctctactaataatacaaaaattagctgggtatggcagcatgtgcctgtaatcccagctactcgggaggctgaggcaggagaattgctcgaacccgggaggcggaggttgcagtgaaccgagagagatcgtgcggtgccatttcactccagcctgggcaacagagcgaaactccatctcaaaaaaacacacaaaacaaacaaacaaaaagaaagaaccattgtattagtgatggaaatgtgttccctccctcccatcctggcaaccactttcttcctcctccatcataaaatatcttaaactaaactaaaataattttatttatcgatagtttgaattttccctatcattgctacacagctaattgagaggtaccccgaggaaaatataaatggtacagtaatgcattgtagattttaataacatacttgacatcccaaattgttttcattggcttcattttaaaaactacatgttttaaaatcaagcagacactaaaagtacaagatatactgggtctacaaggtttaagtcaaccagggattgaaatataacttttaaacagagctggattatccagtaggcagattaagcatgtgcttaaggcatcagcaaagtctgagcaatccattttttaaaacgtagtacatgtttttgataagcttaaaaagtagtagtcacaggaaaaattagaacttttacctccttgcgcttgttatactctttagtgctgtttaacttttctttgtaagtgagggtggtggagggtgcccataatcttttcagggagtaagttcttcttggtctttctttctttctttctttctttttttcttgagaccaagtttcgctcttgtctcccaggctggagtgcaatggcgcgatctcggctcactgcaacctccgccttctcctgggttcaagcgattctcctacatcagcctccgagtagctgggattacaggcatgcgccaccaagccccgctaattttgtattttttagtagagacagggtttcgccatgttggtcaggcttgtctcgaactcctggcctcaggtgatccgcctgtctcggcctcccagaatgctgggattatagacgtgagccaccgcatccggactttccttttatgtaatagtgataattctatccaaagcatttttttttttttttgagtcggagtctcattctgtcacccaggctggagggtggtggcgcgatctcggcttactgcaacctctgcctcccgggttcaagcgattctcctgcctcagcctcctgagtagctggaattacacacgtgcgccaccatggccagctaatttttgtatttttagtagagacggggtgtcaccattttggccaagctggcctcgaactcctgacctcaggtgatctgcccgcctcggcttcccaaagtgctgggattacaggtgtgagccaccgcgtcctgctccaaagcattttctttctatgcctcaaaacaagattgcaagccagtcctcaaagcggataattcaagagctaacaggtattagcttaggatgtgtggcactgttcttaaggcttatatgtattaatacatcatttaaactcacaacaacccctataaagcagggggcactcatattcccttccccctttataattacgaaaaatgcaaggtattttcagtaggaaagagaaatgtgagaagtgtgaaggagacaggacagtatttgaagctggtctttggatcactgtgcaactctgcttctagaacactgagcactttttctggtctaggaattatgactttgagaatggagtccgtccttccaatgactccctccccattttcctatctgcctacaggcagaattctcccccgtccgtattaaataaacctcatcttttcagagtctgctcttataccaggcaatgtacacgtctgagaaacccttgccccagacagccgttttacacgcaggaggggaaggggaggggaaggagagagcagtccgactctccaaaaggaatcctttgaactagggtttctgacttagtgaaccccgcgctcctgaaaatcaagggttgagggggtagggggacactttctagtcgtacaggtgatttcgattctcggtggggctctcacaactaggaaagaatagttttgctttttcttatgattaaaagaagaagccatactttccctatgacaccaaacaccccgattcaatttggcagttaggaaggttgtatcgcggaggaaggaaacggggcgggggcggatttctttttaacagagtgaacgcactcaaacacgcctttgctggcaggcgggggagcgcggctgggagcagggaggccggagggcggtgtggggggcaggtggggaggagcccagtcctccttccttgccaacgctggctctggcgagggctgcttccggctggtgcccccgggggagacccaacctggggcgacttcaggggtgccacattcgctaagtgctcggagttaatagcacctcctccgagcactcgctcacggcgtccccttgcctggaaagataccgcggtccctccagaggatttgagggacagggtcggagggggctcttccgccagcaccggaggaagaaagaggaggggctggctggtcaccagagggtggggcggaccgcgtgcgctcggcggctgcggagagggggagagcaggcagcgggcggcggggagcagcatggagccggcggcggggagcagcatggagccttcggctgactggctggccacggccgcggcccggggtcgggtagaggaggtgcgggcgctgctggaggcgggggcgctgcccaacgcaccgaatagttacggtcggaggccgatccaggtgggtagagggtctgcagcgggagcaggggatggcgggcgactctggaggacgaagtttgcaggggaattggaatcaggtagcgcttcgattctccggaaaaaggggaggcttcctggggagttttcagaaggggtttgtaatcacagacctcctcctggcgacgccctgggggcttgggaagccaaggaagaggaatgaggagccacgcgcgtacagatctctcgaatgctgagaagatctgaaggggggaacatatttgtattagatggaagtatgctctttatcagatacaaaatttacgaacgtttgggataaaaagggagtcttaaagaaatgtaagatgtgctgggactacttagcctccaattcacagatacctggatggagcttatctttcttactaggagggattatcagtggaaatctgtggtgtatgttggaataaatatcgaatataaattttgatcgaaattattcagaagcggccgggcgcggtgcctcacgccttgtaatcccttcactttgggagatcaaggcggggggaatcacctgaggtcgggagttcgagaccagcctggccaacaggtgaaacctcgcctctactaaaaatacaaaaagtagccgggggtggtggcaggcgcctgtaatcccagctactcgggaggttgaggcaggagaatcgcttgaacccgggaggctgaggttgtagtgaacagcgagatggagccacttcactccagcctgggtgacagagtgagactttgtcgaaagaaagaaagagagaaagagagagagaaaaattattcagaagcaactacatattgtgtttatttttaactgagtagggcaaataaatatatgtttgctgtaggaacttaggaaataatgagccacattcatgtgatcattccagaggtaatatgtagttaccattttgggaatatctgctaacatttttgctcttttactatctttagcttacttgatatagtttatttgtgataagagttttcaattcctcatttttgaacagaggtgtttctcctctccctactcctgttttgtgagggagttaggggaggatttaaaagtaattaatacatgggtaacttagcatctctaaaattttgccaacagcttgaacccgggagtttggctttgtagtcctacaatatcttagaagagaccttatttgtttaaaaacaaaaaggaaaaagaaaagtggatagttttgacaatttttaatggagaagggagaagaacatgtagaaaaggggaaatgatgttggcttagaatcctaactacattggtgtttaatataggaacatttatttatataacattttaaagtactaaattcatattagtatattatcaaatggatatattatcaaatgggtttaagcatcctacacattttaattcaattgattcattttctttttgctttggatttctatcatgatttaaatatttacatatgggttactttttagatttttcatactatgaaatataagaaaaacctttaaggctagttttatgaccaagacgaaggacttcattgaatacacaaaacaataaatatactgcaacattttgtctttctttttgtagctgcaatttggtttgcttatactttctctttgtctctttgaaaactgagtcagtttcactttctcaggacaggatttaataaccataatataatttagtataattccttgatttaggcaaattatgcaatttgtgtttagtatgaaatgtacctaaaaataagtaactcctctttaacaccaccatcctcaaactaatataacaaataacagttatcctaaaataaattgtctacttccaccatgcagcactcaaattttaaggttgctatgactgcagacagtattttaaaattcctctctggaaatggctttgtttccaagatgatttaggaaccaaagaggtgaccatctcttgtttaatgaactctcaaatcataaacctgggaagtgttttagtttcctactgctgctgttacaaattatcacaaatgtgttagctaaaacaaacacaaaattattattttacagttctagagatcagaagtcaaaaatgggtccacaaggtttcattccttttggaaactctaaggggcaatctgtttccttgtcttttccagcttctagtgaccatcaaattccttggctcatggtctctgtattttctctgtggcctgtgcttccattcttgtatcttctctctgactgtgaccctctaataaaaacacttggggttatgttgggcccaccctgaaaattctggataatctccctcaagaccattaattaaatcacatctgcaaagcctcttttgccacataagttaatgtattaaaagtttttgaggattaggacatagacattgggggtgggggggcattattcagcctaccacaggaaggaattttagggttaattaaactagccttcttattttatacttgaagaaattgaagttttggaattggagagcattatgctaaatgaaataagccaaacacagaaagacaaatatcacatgttctcacttatctgtgaaatataaaacaattacattcttagcagtaaagagtagaatggtggttactagagctggggggtgggaggaatggggagatggtaatcaagatataaagcctcagttaagatgggaggaataagtttgattgttttttttgagatgtgtttcatagcatgatgaatatagctaaatagtaaatcccaaatgctctcatttgacaaaaatgtcaaatatttgagatgatggataggttacttagcttgacttaataattccccattgtgttcaaagatcataacttcatattgtaccacataaatatatacaactgtactatcccaatatataattttaaaactaatataatgaaaaagaaattgaagttcaacattcccagaagctaagtgtaacttaaaagttttgtgagaatttgttttaacaaacaaacaagttttctctttttaacaattaccacattctgcgcttggatatacagcagtgaacaaaaaaaaaaaaaaaaaaaaaaatctccaggcctaacataatttcaggaagaaatttcagtagttgtatctcaggggaaatacaggaagttagcctggagtaaaagtcagtctgtccctgcccctttgctattttgcccgtgcctcacagtgctctctgcctgtgacgacagctccgcagaagttcggaggatataatggaattcattgtgtactgaagaatggatagagaactcaagaaggaaattggaaactggaagcaaatgtaggggtaattagacacctggggcttgtgtgggggtctgcttggcggtgagggggctctacacaagcttcctttccgtcatgccggcccccaccctggctctgaccattctgttctctctggcagg

SEQ ID NO: 21 - DNA, 2501 bp, Homo Sapiens
gaaaaccaggttgagcaggttggtttttcaaagaaattcattgagcttccataatgtcctttctatttgacgggagaaaaggggctttggaagatcaagtgtgaagctttagaattctgtctggagctggttaggaccacccaggcctgagtataagcaaagcgctgtccgtggtgctagtaagcgcgaatgcccccggcaacgttttccctacccaaagttgtttttcattcagtcaacttgcttcgcgaagctcacacatctgcctcgtgcaagattctcagtcattttacttagtcattggttctttccctatcaccattctttatgtccccctcaaagaaaaacattatcttccatttccttatcaactccaaacagctttcatttttctgacatatttactacctaagaaaatggctcaagaattgggtcagactatcttgtcctaacttttctgataagtttcagagaaactcaaaggtcaaaacaagagcataagagtaaaaggtagagaaattaagaaactgaagactaggaaatgggggttggatgggaaagaaaaagaaattgttattaatgctacccggttcccttccctgtccaggtggatttcagctctgttgaggctctgtcagtagattttcagccctaaccagcacttccatggtggtggcacttccactgcctttaaaagaaagagctttttttaattctacagggatttgggggatgaggagtcagagctaaggtatcctaaaaaaaacatgtgaagactctcattttgcaatacacaagcaattgccctcctgttaagactttgtcttcctcagcactccgaaccaaaatgattctgtaaacaaaaactgttcacttttaggagaggtccacttatgcagttcctcaccaaagtttttaggcaacaaatccataacttgcggttctcttcctatccaatgtagcatccgctgaaatgttttaaatattttaagtaataaatgttgattcaaactcacctaggaagattaggaaggggaaaaaaagcacttggcatttaaatcttcagaagagaatttaatgacaggttcagcctgtttaatgacaagcccagcaccacacccctctcttatgatgtttcattattactgcataaatttcctttattactcatgataaataaaaataagatacctgacaaagtgggtttaaataggtaagagtgcaaacaaagatttactgtacaaatatgatgaaactgggatctcagattcttaaagtataatttttttttgtcttatgtgtgccaggttgccactctcaatctcgaactagtttttttctcttttaagggttgtatccataatgcaaaaatggaaagaattaaaaagcacacgcaaaacatgattctcgggatttttctctatttttatggttgactaattcaaacagaaagacacatccaagagaaaattgctaagtttgatacaagttatgaaacttgtgaagcccaagtactgcctggggatgaatttaacttgtatgacaggtgcagagctgtcgctttcagacatcttaagaaacacggagttattttgaatgactttctctcggtcacaagggagccaccaacgtctccacagtgaaaccaactggctggctgaaggaacagaaatcctctgctccgcctactggggattaggagctgagggcagtggtgaacattcccaaaatattagccttggctttactggacatccagcgagcagtgcagccagcattcctggcggctccctggcccagtctctggcgcatgcgtcctagcatctttgggcaggcttccccgccctcgtgacgcgtcggcccgggcctggcctcccggcgatcacagcggacagggggcggagcctaagggggtggggagacgccggccccttggcccagctgaaaacggaattctttgccggctggctccccactctgccagagcgaggcggggcagtgaggactccgcgacgcgtccgcaccctgcggccagagcggctttgagctcggctgcgtccgcgctaggcgctttttcccagaagcaatccaggcgcgcccgctggttcttgagcgccaggaaaagcccggagctaacgaccggccgctcggccactgcacggggccccaagccgcagaaggacgacgggagggtaatgaagctgagcccaggtctcctaggaaggagagagtgcgccggagcagcgtgggaaagaagggaagagtgtcgttaagtttacggccaacggtggattatccgggccgctgcgcgtctgggggctgcggaatgcgcgaggagaacaagggcatgcccagtgggggcggcagcgatgagggtctggccagcgccgcggcgcggggactagtggagaaggtgcgacagctcctggaagccggcgcggatcccaacggagtcaaccgtttcgggaggcgcgcgatccaggtagctggggccccagggc

SEQ ID NO: 22 - DNA, 2501 bp, Homo Sapiens
gtgttctagctcctgaatccatgctgttcgtcactacactgtactgcctgtggatgacttacttgtccctgtagtttcatctgaagaattcctcctccttttcctttgaggcctgcctcaaatatcacttcccctgtgaagactgcctggtgttctccaggagagagtgtgactcccttctctaggaatggtagcaccccaaacacacacattttgcagcatatttcaccttgcatggtaatggcctgcttgtgagttttattccgtaccagagggtgagggctctgaagatagcgccaggtcttatttacctcgataccccacaacactcattacatgtctgatgaatgaatgcatagggggatggctgggtgcatttctctcaacttttcaatttcttgaaataaataacaaaatcttaccttccctcagaagtcctggcatggttcctttcatcttgccacagccactgataatcactttcattttctgtgtaactcaccaggcaagaagtccatgcagatttacttttagtagttcacatgacaaataaatactgcgtttgatttccaaacattaaaccatagtatattatagatagatatagagttatcattcaaagtatgatatttcaatctcaaaaggcttcccctgaagaatattacaaactcttcctctctttaagatctgctgggtaggaaagatgggagaaaatgaattaatgtttacacagaaaggaggataatgggggcaaaaataatagatgaacgtatgggtggatgagagaatggataaaatgataggtggatatgttgatcttggacagatgggaaatgagtggatatatcaataaacagatatgtgggtggatgggtggagaagaggatggtggatggttgtggttttatgaagagatgtgaaaaaggaagtgtggaatgatggatgagaagttgtatgggaagatgaatagaagaataggtggttgaataaattaaaaggtgtgtggttggatgaatgaatgagtgggatgatagatggacctaagtggttagtggatggacaggaggatggatggatgtgagagccccagaaggacataaggaaagatgggtggatagatggatgggcggatggaaggatatttaggaggatgaatgagcatgtgtgtggagagaggtgcccattcacactggcttgaacacatgggttagctgagccaaatgccagccctatgacaggccatcagtagctttccctgagctgttctgccaagaagctaaaattcattcaagccatgtggacttgttattgaggggaaaaagaatgagctctccctctttccacttggaagattcaccaactccccacccctcactccccactgtgggcacggaggcactgcgccacccagggcaagacctcgccctctctccagctcctctcccaggatatccaacatcctgtgaaacccagagatcttgctccagccggattcagagaaatttagcgggaaaggagaggccaaaggctgaacccaatggtgcaaggttttacggttcggtcatcctctgtcctgacgccgcggggccagcgggagaagaaagccagtgcgtctctgggcgcaggggccagtggggctcggaggcacaggcaccccgcgacactccaggttccccgacccacgtccctggcagccccgattatttacagcctcagcagagcacggggcgggggcagaggggcccgcccgggagggctgctacttcttaaaacctctgcgggctgcttagtcacagccccccttgcttgggtgtgtccttcgctcgctccctccctccgtcttaggtcactgttttcaacctcgaataaaaactgcagccaacttccgaggcagcctcattgcccagcggaccccagcctctgccaggttcggtccgccatcctcgtcccgtcctccgccggcccctgccccgcgcccagggatcctccagctcctttcgcccgcgccctccgttcgctccggacaccatggacaagttttggtggcacgcagcctggggactctgcctcgtgccgctgagcctggcgcagatcggtgagtgcccgccgcagcctgggcagcaagatgggtgcggggtgctcagcgcggacccggcggcagcccctccggctgagtcggccctgggggactggagtcaagtgagctgtctgcgaagtgcattgggctccggaaagcagggctgggatttgcgctaaaccgttggagaatgtgtctgtggaagcaccatttggttgaaagaaaaagagaaagagaagaaagtttgttgggcaggctgccggcgcgcagttttgggcgaggtcgctagagctgcagcacatggcagaaagtaaccgttctcccggatgcgcacagtcgttgtctggactaacaggctcctgtgcccaagggctcgccaagccccaccgggctgtgtctaggcagggcagagctgggcggggca

SEQ ID NO: 23 - DNA, 16579 bp, Homo Sapiens
tgttttttaaaatgatgtctagctgaaccagccaatggagacaaaaatatttatatataattttcctctaagttcactagtcattttatagatcagttataactttggctactccaatgagttaatttctttctagagacattataaactccttaaagatggaaaataattgttacttttttgaataatgcctactatctaaaacaatgcacataaaagctgctcaataaacttttgttgaattgagagaaaatataaaaaattgaaagcagtctgtttgtaataagtgtttgctaagtcttacagatcttctcttttttttggaattattgcaacaaatatttgacctttgatttgtaggattaaaatgtgatttctcatattttaataggagcaagcattagtcctgcaattctttttgtcaatagaataaaaatggaatgtatgcttgctgcttctacatgccggttgatacccatgctgaacacttttcttacaacgcagaggtttccttgttttctgtcttgcgttctacctttgctcaccacagagacattaatgatgccatgtgtctttttgcaccatcagtgcagcagctttcattatgctccttgtctcggtcccactgtagtctaattaaataaatggaaacgggtagtcactgaaaataaacagcaactgcaaaagttttgcctcttaagaaaccttctgcattgtattccgccctgcctcattgattctaagatctctaccgcttccttgtgttcagaaaccagactcttcagtttgtcttgcttcagtcagacaaatgctttataaaaatgacctatatttttcagactgtggggagagaagaaaaagactttgagaaagtgactaaggagggagtaagagtgatacaatctttgattcaatttagttggactgtgttctttatgccttcatctttttctttataaaaaagatagcgtttttgatgctctgctccaggcagcctcccagggtgagtgcagatgtgctgagccatttggctgccttgaggaccggctcagagagcctctcttctcactaatgaagtcatctcctctcggcagcccggcctctcccatcactccatgttggaacttggctttggcttgcatagttctgtcgtgatgtagatggtctttcagttaagttctagagaaatctgctcaaccatgaacaggacatttacagcacaggagaaaaaaaaatttattaaaacaaatattttactgtaacattttgatttgggggttggagagcaaaaactcaatatctgatgtctgggaaaaatctaatgttttatggctttctaaggaaatttgtctgtgtttaatttatcagagcaatttatatacttcgggttaaagcacaatgagattgccaccatcactttgccttttgcaagatttcttttttaagaataaaaagaaggcaataaagaccttatatttctgcctttcctagaaagccaaagagaattcaaagtgctggatgaaatgtctgtccctaatttgcagtgttttatttaaaaaaaaaattatgacacaatcttagaggataggcttcctttttccagggtctttgaaagttaaaagtacatttttaatctgtagcattactgtatcatccagtgaggataatttgcttagttgtgcctaggaccagtcagatcaaggagttgaaactaagctctttctgaatttgaatgggactggaatcttgtcatccctagagcagcaatagatgatgccatgtctaagaacacttcacctgatcaataaaaaaggagaagtctgaaatgtaatcctaaagaacctcagaaggaggtttagatgaagataataaaattccctggagacacatctgccatctacacctttcctctccaagtcattggcttgctgcccctgagctcagccaaattcccaaagacaagatcaaagcaaggaagcaaggcacatagcttctggcttatggtttcttttagacacaagcattgtgaatgaagatcttgctttatttatacctgggatcttggagttttcacaaagaatatccccagtacaaggatgtgatttaaagggggactcacagaataatattttaattactgtttgattcatacttgagtgtaatggacaaataaatacaattttagttataaaacctgaaaaatatatattttcccattcaaaaacttctgatagttttgtcaggcattggagaatcagaaataaatgctctctcattttctttctcttgatgaaggaaagtcattaaaaacagttacatagaaataataatacaactgtagactctattctaaatatagctggtatgttttcctttttcttttttatccattctccattttagacagctagaggggaaagtctgccctagagatagaaagaagatatccatggggtataatttcattttagttatctgatagcctgaagaagtatttaattttctgaataataatgttacaagtcaaagaagagaaaagacaggcagtttaaagcttttcaacattgtgcatattctaattccttaagtcagccctgagaaagtgcctttgtcctgtagaagtatttggtcaagtgttgtgaagtctattggcattaaaagaaactaaaaattttggaggattagagaatcaaatttggcaacataaatgaaaacatctcagaatgtaaaaagtatctaacccatcactttcaatcatgttccattatatacagatggcattatttatagtgaatgttaactattaacatttccctaaaaatgggcattaatctgctattagttgcttgtttctgatctagttctcctttgttgaaaggttttacttaactgtatcataaagggacaaaagggtaaaagataataagcttttcagactggcagatctgtcacttacaaaatggccttgggcaggttacttgaactctttgaaactcaactagatttactcaaatttaagaatgagaatacaaatccacatcttgaagtgtttcacagaaaggtctatcttaatgtctggagtatatatttcaatgaacattcattttattttatttctctccattcctgaatcaagcaatcttgaatctaaagttgctatgattagcactgaaaagaccactggactattaattgtgtgactttgggacagtaactttctgcaccttagtttgtttacatgttatacatgaaggttgaagtctgattctgctctgtgactatcattctaaacatctgatgaaatcaaatttcagtgtttggaatggtagtacaataaatttactaagaataaataattcactgcaaaaacacattgatttccaaatgatgtaactgacagttatattactgcagagggctgataaataacaaaagaaatgaaagatgcacatggtgagaactgaaattatcctgacaagtcttctacctgtttatcacttaaaatcaatgaccatgctgaatgcctacaaattacaaaatataaaagaaatcttataaatgcgcatgtacaggagtctaagttactaaaagttttaaagcataagtttaaaccaaactaatcaaagaagttgagaggaaaaattggctttcatctttaatcactactgttttgaggtcctatgtttaatataattttctaagtagaggcttcagagagaagagttgtgaggatactttcatatttgtgtagaaggaaaagtttgccatccattctagtatccctagtgttatactgatgtgcaccttggatttattttgttcctattgtataaactcatacttgacttcaaagaaaaggaaaatccaaagtccctcttttctaaggggacagaaatcctttgtgtcaactgtttgacccttttctctgtaaggtcctattggaaatcttttgtaacacaatgcaggggactcttccatgtgttgatgctgtttacacagtggggtgggcctgactgaagaaaaaaaatcgcatatacgcatgaaagattatggtcttatttccggaaagcatgaaaggtgattgatacttccaagaagtccctgttactcaggaaaattatcaaatattctactcagagatacttggaaagactgaaggaaaggaagaacgaagaaagcagaatctagacttatgtggggagagatttgtggcagaggaaaagtattctctttgaatccgacaagggatttgcctgggggaatttcctgtccagccttttattaccagggtcttttgaagccgggctccccattgggcagttccctgggagtgcagtggggaattcttacactttccctctaggtccccgaaggatctcgttttctcagtgtctctttcaggttggcaggagccttgagcctgacacttccctttgatgggacaggcaagctctgtgggcgcgtaaacacgctgtaaccaagttctttgctgattttacagttttgtgtgctcccgagaagaagtgatcgtactcaattgtctattgctggcctgccccctaagagcctgggggctcctttcccctaacccagaactagctgcacggggggcggggaagtgggggtggggaaggagtgggagggcagtggtttccgcgagcagagcgatgttactgagtgagtccctgaatggggagcgctgctgtccccaagccgattggtacttcttgtcaggaagaaacgccaagaggtgggagtgcctggggagggaggcaggcggtccctaccgcaggcgcggggagctgcctttccgcccctccgcctgctttccaagcctggactcttaggagtggctgaagctgcggagcgcttttggagcctgtgaatgaaccctcctcctctccctcctccttcttctcgctgagtctcctcctcggctctgacggtacagtgatataatgatgatgggtgtcacaacccgcatttgaacttgcaggcgagctgccccgagcctttctggggaagaactccaggcgtgcggacgcaacagccgagaacattaggtgttgtggacaggagctgggaccaagatcttcggccagccccgcatcctcccgcatcttccagcaccgtcccgcaccctccgcatccttccccgggccaccacgcttcctatgtgacccgcctgggcaacgccgaacccagtcgcgcagcgctgcagtgaattttccccccaaactgcaataagccgccttccaaggtaatcacgtttcttttgttccccccttaaaaaacaaaaacaaaaaacttatagaaaaaaacccgcgagcttagaaaaaagaagcaattggtagaaggctttaattaaggcaaagagctgtaaggcgaagttaagaaaatgtaggcacttaaaaaatgcaggtaactttcataaaggcttttggggagaggcatacagagggaccttggtgttgaaaaagattcagacaaaagaaacccagggtggggtgggggtaaaatgactaacggaattgggggaagggagggaataaattgtaaagaaatcatagaaaagtggtgggttcttgagctggagagaagagagggacctttggcactttgatttttttgttgttgttgttcttaacacgctcgaggcaaaagtttgaatggggactaccaagacttgccacagacaagtccccgaagccgccttggtgcaggccacctggtttcccagcccctggtgtgtggtcagtgcctggtgttcctggaaagccactcccgggcagctcctgacagtgcgacccggcgcccaagcagcctgggaccttgcgcggacctgaccccttcagaccgcaggcagtctgggaggaggtccggccgggggaggtgcaggatccccgccgtgtctctttgacgacttggggactgtcacggttctctcccggcgcccctgggttcttttgtcctgcacgcggtgcgaaggggccagcagggaaggagcagaggatggggggtggggttgttggagccccgcggaggtctgggaggcccctgggcgggaaaagcctgttctgaatcggcagggatgtgcaacaatttttctcaccctgaagagtgaaatagggtctgtcgctcccatctcaacaagcaaaccggcacccagagcgcactgcagacaaaggtggctcggggacccgaatcaggggcctctgggtcagtcctctcgcccagactacaggagtcctccgtttccttacatattccccaccctctcctagttctccgctctagttgagcaactttactggcaggtctagcggcagcggcgcgcgcgtgtgccgggagccccgggggacgtcctcggctggagcgccccaccgtcctgcagaggcgtgggcgctgtagggcgacatccctggtgcgtgcagacctagggcatccgggttgttctggcccgcggtctgtgtcactgggcgtggagcggtctgggtgttaggcagaggagagcggggtagaaaaatagtgtcatagcctaaactatttgctctccaatccaactgcgtctcggcaagtcctgcatgtccctgggagatgctgcgggaagggggagaaatctacacggcgcctggagagttgtcctgccgcgcgcacacccgcggcagagtctctctgggtcgcgttcctcatctttgtgtctccctctgtctccatcttctctgcctcccttcccctctcccagcctctgttctctctctctagcttctgcgtcccctcccccacagctgacaaatgaatggctagtgtgaaatccctgcctttcccgtgctccaaggcagcagggagggaggagcgagggaggcggtgcgctccttcggatctgcccccagttcagctcacaagacttgcagaacctagatgtctaggaattgggagttttgcggcgggtgtgggcgccccctgatggagaagtcccgcacaggcggagaaaaacaagccccccagaccaagcgtgcatctttcacaaccttgtgttcaaggatggaaggccctagttttcccttaagtcattcattttgcactccacaatctgcggcgtacatctaggagtttggaggaccctgaaaaaaggtcttggtctgtgcaaagtgcagagatgccttctcgcgagtcggctggaacgcacgcggcgccctgggtccagttcgccgcttagtggacgaacgcacatggccggggtggagccaggtttcggaggtctagacgcgccaccctgggcgtctttaagaaagataatacacataccgtgctctcaaaacccatgaccacttgaacccaacggtagggccccgccccaggatattgcaaaagaagggctcctaatccaaaacttaaacttcctcaacttcagggcgggcgtcggacgggaaagtggagagaaggcgggcagtgggaggaaaaaagaaagggaaggaagggaagtggaaggaaagaggaccgtggaggggaggaaaaggagaaaggaacggagatggggcagatggcattcaaacagccaggaacggaccggaagggttcgtttcggggtttgggtctgaatttcgagactcgttttaggatactcttttccctttcccagcggcaacaaatgtgactgcagaggcgtgccgggatggaagggtgggaaagaactagacaagcggaggtggtccagccccgcccaaaggggctgggtctggggcccgcccccactcgctcacctcgcgccaagggaggacccgcaacgggcgctccccgcagcggctgggttagccagccgccacgtgggttggcgcttcggctcccagccgagacgggtgtgacttcctgggctcagagactgcagtacagccgcacaggcggccggcgcagccgaggcccccacccaccgaggccaatgggggcggggcggggaaggcagggcccagcttaaccgagagagccgagtggcctcgcccccgggattcggggccggctgcttctggagctgacccgagttccatccagacagcgctgaacactcttattaaaaggctatttaagttttattttattttattttatttttgcttgcttcttgggagtggtaggaggggcatcgtgcttttgttttgaggcaggggagaggttaaaatttactccaagcaaactttttgtcagaaaaatgagactttataccgtattccatttgttgactttttaaatacattcaggtcactctaaagcccattcttagtcaattaacagattaatttcgttccagactgtcataaagagttcgcctggaatggcaaatactgccattcgacaagactaatagaatttcatgggggcaaacatggaagggctgcgagtgtaactgaggttcctgtgcctcaatgaggaaccttagcggggacctggcggggactggaagctcagcacctatttagggagtgactgagctggaaacctggagaagcttggtgcagacgagacggtgcttcttagagctgcattttaagtcctcccattttgctgcatattggaagaactggattttaaagatcttttccatcacctcagattctgtagctaacagccacgtctttttctttttgtctgctgaaagctgtgacctaattgttttaagcacttcttgacaatttcgccaaacccatcctgaaaatattcacataaagtcctaaaataggatgttgtgagtgtaatataaaaataggaaggtaccaatggaagcaacaattagtgttctgagatagaagcggttcccagtttgtaacttggaaatgttaagagcagtacatcagggagaaggtctccaagagtctgacttcttgttctgagctctgagtaaagaaagaaatatgttagaattgtattgtctgcccgcagtaatattgtaaagggttccaatggattccaatgtgattgagcaattacttcctccagcaccaagtccacagtccttaatcttcttgtgagaagattaggtaggaagcgggatgagattcaagacaatcatttaggatttatgtcagaattcaaagttttgattcttttggtagataaaaacagagttggttttaaattgtatttcctgctttcaaaaaaacgaggtttgaaaggaatccccctagatttacataggtttacagatgtaagtttcttctttttccctgtgtttgcaaactggagggagatgcctttgatattccagaatacctgtatctatacacttgtaaattctgctaggaaaggacctaaacagctaaaccaaaggtgaccatgattaatgttaaagatactacccattgttctctcttttgttgtattattaggcttaaatactttggagttaatgattggtcacttaattgagtaacagagcctttgagagcgcaaagatcaactaactctgtctcccaaagtctggcaactaagccctcctttcctggtgagatttaaacatttttgttgacgtcattcatggacaaacatcggtaaacactgtatttaaaatgggatattgccctgtgatggagcagaacttctcaagacacatggttcttttgaaagaaagaattaatgactgtagtaaggtattttttcaccacccacgtagagaaaccagttaggactgacaaacactcattgttgggagttacttgctctggtctgagaaaatatgctgattgttacataggtctgtattttaccagaaaacacaaagcatgtactctccctgatttggaatcagaaaagggggattagatatggatgtcttggccaagctccatttcaattagtgaatttttgccagtttcctcttgtagcctagacttggtaaattacatatatataaagtctgtgtgtgtgtgtggggtgcgtgtgtgtgtgtatgtatacagggtttttaaacactgctaagttcttaccattgaatgtgttagaggtggttgtatttcagaggtcagtacaaagaatctttgtttaatgtgtcagttctgtttcctgaaacacacctctgggtagatttaccaactataaaaggatacaaatgtatatactttccacatctgtatacatcctacctcattcttctaaggattttaagaggtgtttatgtctataaaatgagattacatattttacaataaacatatttgataaattataatctttttattattaaattattgatttgatattacttgaggtatagtggaatgagcactagacttggaatcagaaagtttgagttggactcactagctgagaaaaccaagcaaagatattacttttggacctttagtgtcataatctattaaatgaatatgcagttataaagatcaaaagagtaagtactttgaaaaactatacaaaaaagggatgataatatattatgtcttgggattcatattgatctaattctataattttaataataactgcattacccaagccatgtagtttctactgaatctataaaataaatcagagaggggcatattgttttaaaaattgtttagtttcattaatcagaagacagattacagaaattgactccaatgaagttggacattcagtggaaaggaagaattattcaataaatggtttcaggacaattgatgggtccatgcaaaataagaatcagtctctacctgatttctcatcctaaaagaaatataagatgaatcaaatatgaaatgtagggaataactttttacaaaatgataaaagaaaatcatgggattaaaaaaaataagttaggaatagagaaacctgttctaagcaaaacataaaacccagtgccattctaggaaatactgataggtctgactaagtaaaaattacacaaaagcaaataatatatttggaaaacatctacgacatttgagagacaaaaagctaataactcttgatattccatggacttttatgaataactttgaaaagtccacatctatcaaaatatgagcaaaaattatgtacaggtagtggcagaaagagacatagagttttaaaattatagaaaaaatcgctcagcctcatctgtaattaaataaatagtaattaaaacaccaatgatatgctacaccattttttcaccaatcagaggagtaacaaaaaaaaataatttttttctttttttttttttttgagatggagtctgttactcaggttggagtgcagtggcacgatctcagctcactgcaacctccgccttccaggttcaagcaattctcctgtgtcagcctccctagtagctgggattatgggcacccaccaccatgcttggctaattttcgtgtttttagtagagtggggtttcaccatgttggccatggcagttgatcttgaactcctgacctcaagtgattcacccacctcagcctcccaaagtgctgggattacaggcatgagccactgtgcctggcaaaaatgaaattaaaaagtttgatgcaagtttgtgttggccaggttgtggagaaactgggtctctcatatactgttgtatgaaagtaaataggttcctctacttcaaaaaataatttggcaatcacttttttttgattctttatcaaaagtttttaaaagatgtatatactctttgattcagcaattccacttctcgacattattatatggatggatattggtaccaatatcacccaagacaaatggacaaggatgttctttgcagcattgcttctaagagcaaatatctggaaacagtgtaacaggctcatcatagggaaccatttaaataaaagttgctgtatccacctaatggaaaactatgcagctgtcaaaaataacatggaaaaattgtatttgctgatttggaacattctccaaaatatattgtattctaagtgaaaaaattgatagataaaactgagtatatattatacatctaattatgtaaaatgggtgtatattcattcttttaacaaatatttactgagtgttctaggcattgtggatacaggagtgaacaaaacatcaaagactgctctgttggaacttttactatggtaggtagagaaaggcaattcccaatcacatatgcaaaatggtgatatgtgctaggatgaaaatagagcatgggaaagggaatagagtacagtatgtcttaggtagagtaatgagaaaggagttcaccaggcagagaacagaggagtgctaaggggcgacaatgtgaaaaagcttagccaagtccaggttcaggaattcacatgatgctattacttgtatgaagtaaattcatgaaatttcgcacctaaatcacgtgatttctctctgctgtacaatgattctttctgtgagaaagaaccagtgagcaatatgatatgtgatgctcattacatccactttgtagctgaagtatcctagaaagttggttgtctagggtacctaattagcagaatggtggacaaaaccaccgtgtctctgtccttaagtcaccccttgtcagctgagcttccccaaaatcaagggagaatactaaatatctatttaatagaatcttggctttctctcggaggctgcccatccctggtgtgtcccttatcctccctgcagacatttctcatggataggagttccattgaccttgtcttttatgtctcccaggcaattaaacagtctcagtaccctgtacctggattgttcaatgactttcttcccttctcattgacttcactggagtagaaggctaaatataggcattcactctcatatctctcaggtctttccatgcagacagagttgttatcactagtagacggtgcttataagagagacatggaaaagtggaagaatggaaatagggatttggagtggtgctaaaaacaaagaaagaggcttctgaaagctttccatttaatatgatcaaacatagaagacaaaagatgtaacttaatgaccaaggatagggacatagccttgagaaaattacagaagtggaatgaacgtcttggactccaaagaagagggaatggaaatgcagttctgaggcagctaaagtcaataaagccctctgatatatttactgtagaaataaatgatcatcttttaattcaaggtttgcaaacttaggtgactacaggggcgaggcatggagtggaaatgggtaagagactaagtgggggcagtaatggccttgagcacacagacttaaggggagagactgctgcttggttaatgctcatgatcagccagctgaaatatagacttagtgttgctagaccttctgattttttgaaagaagttagagattttatatttagtgtaaacagtctaatttttaaattgagtaacttattcaaacatatttatgcaacttattcaaatgtatttagagcatgtctgatctcctccttgtattcttacctagtcttaggggtaatcttaaggaaagtgatgcgtatacttgttgtacctatgtagatggaggaccattctcctctccccaacaaaagacacttttataaggattgagtgtggcacaaagagttcgatttttagtatttaaattgagtaggaaactcaaatacagaagatcctttcctgggtcacacctttggtttttttaaatgagatttgactctctagatattgacaaacatcatattattgggtcatggtaaatcttcaagtggactgattcaaaagtgttcaaaagtatttcaggtgttaaggaattgttggcacggagtttcaaaggtgtttctgcataagaaatagaggcgttgatcatgtatttgatctacaaacattcctcaaggatataccctgaacctggcaatgaagaaatattgtgggaattattaagttgaataaagtactagctctgccttccagaagcctactgttctacagaggagattagacatgtttacagataatttgaagtacatagcaataaattataggatgatttattccaagcataaagtgtatattgctactatagtggtaacctaggttataattttcaaatgtaagagccccaaatactattctttttactcttagtgatatgaaactatgttagaacatctgcagaaagtctgaattagtaattttaataataaatattgagtactgatatattgtatatcactgagatttattttatatacattattttatcaattcctatgatcacttcggtaagtactaattttcacaactaagtagtgacagaaaatgaggtttagagagatatagtattttacccaaagtcacagaatataagtagagaatgcagaacttgcattctgggctatttgacagtggagcccagacttttaaaattaggcttataaagatttcctggaaaaaaagaaaaataaaaaatagagaacaaattttcctgaagaaaagtaggaaattattatttataagtataattaaagagagatctttaatttcttttttttttttttttttgagacggagtctcgctctgtcgcccaggcgcaatctcagctcactgcaacctccacctcccgggttcatgccataaagaaagtttctatttgattggtccgacctgattgtctactagaacataggctttccagtagggttaacaagtcataacagttctagtgatataagataaatacaaactaataataaggttaatttagaattatcaacatatgtttttcattgtgaattatcagttggtctatagatggaaaatataagatatataatgtattagcttaaaaaatgctcttcagagagtgtctagaattatagaatttaaaaattttgttttgaaaaggtctaattcttatttcaaaatatataaagaaatcaaatgcaaaaaaattaagagaaaaggtcttaattaattaaatgctgtacaactccaagccctatttatgttcaagatcagttttgtaatttatgactaatttcagcattagcttgttttcaatctaggtttgctaaataatatagaatttcttttccaatgaagtttttcagggtcccagctgaaaaatatataccagttaggatgctttcaactgtaaggaacaaaaagtcacgattttattgggtttaaacaataatgacatttataatctcatataaaatgaagttcaaaggcatggtccactctaggtctaatccttaaggacttacgccttgcctttgctgattctttctcagcttcatttccagaggtatctcacttactcatggatgcaaaatccctacaacagttccagcagaaagattccagcatgataatgtccagggaagaaaactgaccacctcttcctttgttctcttctcaggatgaatctatctttcccagggacccttcactggaggaagagatcccctcacatctcactggccaaaactatattatatactgttccaaatccaatcattggaaaagggaatggtacctctataattgacttaggatatcaggatcatcccttgggctggggtttgacccaggattctccaaagtatgtgactgagggtaggcactagaatggaaccagagttgtgttagaaaggagaaacgcatggctattatagaatagttctaaatgctaccgaggagggcacaactgtaaaaaccaaataatcttttgccattcttttgaagttggcactttgatttctagatggttccccaacacaggttcttctcctcctcatcattatagctgccttgaaatttgagctggaagggaacattctgagacccagattgttaaatgtcttttccaaagtcatgcaataaattaaatggcaaagccagggcagtttcttgactcagtacagggtattttctttcattctttactcttgagactttagaactgttggtactgctttaaaattcatggcaagaactggtcacttttgtaattaacacctccttataatacatttgttttgtttgcttagccagctagaaactacatggagtctgtgctttaaaaagcctgccgaagtccttattctctgttttggtattatgtgcatgaaccaccaattggttccttctcaccttacacttgatgaagatgcctttctttcaacatctttctctattgctccccatcttctcttgctctatttatgatcagctgtctgtttctaaatagactttgtggtcacccatttctttttgtgccagctcctatccactagttacttgaactgtggtctctattgttcttcatacagcctactcacttgtggttgtcacacacatccacattgttatatgttcccaaactgtattctggaatgattttggtaatggctgcattggatgagattcaaactaataattaaagcattgagatagcttctgctattacaagtttactcctgtttttatagtccaagaggagctacttcttctactcttattacttaatgcttaatactacccttattacatacaatgcacaaaaagcatgtgatttatgacccactttaaacctgaatgcttgtgatttactttgtgtttttcttcatttctagg

SEQ ID NO: 24 - DNA, 6090 bp, Homo Sapiens
cagagatggaatgctcaaattaggacaattcagggaggtgtgggagaggtgcagggggaccataagggatggagcaggaacccaaggtagtaatagcagagctggcaccaaccctaggctcaaaaagacaaaggagagagagtggttaccaaaacccagaaagagaaaacccggtaaaagacgggacctggtgaggagcagcaacctgtgtttggctgtggactgtggcaatcttgcagggaggagagcagaggaatgactatcttggcttcactctccttccttctccttcatctcatgtcaggtgccccattggctaaacctaccagcaaccagaggacaaggaatgcattaaaataatcttacggctcagagagtagattagatgtagagtgacaaatggattatatttagcacaatcgcaggtctatttgttgatccgtctccctcatcagactgagttacctgaggacagagaatgtttctcttatatctgtatccctaacatttggtggacactagatactcaagaaatgcttatggacgggatcagagaagatggtaaattgggcattagatggaggtttgtgctttctgagcttgccgcatgctttctggcgaatccaaggcaaaatgagaaacagaatgagctctgtacttttgtctggtaaaagaaaatatgatttggtgagaagaaatgaatacttttagcactcagtgctgggaggaactggaatcagtcatgtgactgcctctatcagaggctctcaactgcgtaacggacagaatctttaatggtgaaaccacaatgcagaaacattcttttttttttttttttttttttttttgagacggagtcttgctctgtcacccaggctggagtgcagtggcaccatctcggctcactgcaagctccgcctcccgggttcaccccattctcctgcctcagcctcccaagtagctgggactacaggcacctgccaccacacctggctaattttttgtatttttagtagaaatggggtttcaccgtgttagctaggatgctcttgatctcctgacctcgtgatctgcccgcctcggcctcccaaagtgggaaacattcttaaaaatattagcccttgataaaaccaaagccatgttacaaaaaagcaaccaaaaggtggaaatgagataatatggtccactttgagctgagaacatcttgccagaaaatgattgtctcagacttcaaatctgacctcctacataaaccttcagtgcaatcctccctgtattatctcttctctcatcagccaaaagatggaaaggataaactgaggaacttacgctggaggagcatggattcattagatggcagaaacctgggtttctgaatgactactgtggagctgatctctgcttatgccctgcaaacctttgtgctgagagcaagtaacacatttttaatgtgttaaacctctgggatttgttgggtcttatagcaatggttattttaccctaatacgactgtaaaataatgttctaaaatctacagtcgggtttgtttaaaatattatcgccatcattattataatccatagtccatatcataattatttttatagaagtccttctcaactggcatctcataatttgtggcttcttatattgttgccttctatgtgtgagatgcctctctgagtcctttttgctagggacatgatagaaaataaaatatccaacattctggtgtattttataatgtacaaagtcctgtttcatgcattatctctttagattctcccaacaaacccaaggaatatgtaagggtctataatcatcttcatttcacaggtgatgaaactgagacgtttacatgtaaagtggaaataaccacttatttatttatttatttattaaataaaaaccccgctaatttatttaaagattaattgagagaattatttcatctgtctggaacctggtatgtgttaagagaaaagttttcttaatttttctttttaagaagataatctattgctacataacaaaccactctgaaataatgacttaaaacattaaaagtcattgattttgctcacagaacttgaactggaagatataaacaactgggagtgagggtggggctggacagctggcttctctgggcatctctcgttctttctgtggttttgtcacatgtctctacatggcagccctagggtaatcatgacagctgaaggctttagagtgggtggagggggagagggagggagggaaagagagagagagagagagagagagaaagagaagcaagcaggcagaagctctaatgccttatgacctaaccttggaaataaattacactgtgccactgccactaccttttcttagaagcaagcagatagggttggtgaatatttattgagaggggaattagactccacctcttgattgggggagtgtcaaagaatttgtgaatatgtttttaaatgaccacatttcccctttctaaaatgcttgtctaaattggtgtacacaaaaagctcgggggttagtgactcatccaaggttattaagctgttaaatggttccaccaatactagatctaattttgtgactccaaatttcatgctctttttcactactccagataatctccggtgaacatcattgtccattagggtagttaagacattctagctgccaaatagattcagtccttttaattgcctcggacaatatattttttattttgcagaaaataaatattacccatatggcagtcatccataaacaccttccaagtttatcccaaacatctgtgttttaaattttttctcccaacagatgtattcatttgcattttcccagatgaatcactctttttttgttgttgttgttatttttgactgtatttctcacctctcaagacccttttgtattatcaagcccactgcttaagctaataccatctcccaatttggggacttccccttgattcctgtgtgcccttcctgtgggtcattaatgcaatgttatttaagactaggatttggctgggcgcagtggctcacgcctgtaatcccagcactgtgggaggccgagccgggaggatcacctgaggtcaggagttcaagaccagcctgaccaacatggtgaaaccacgtctctactaaaaatacaaaattagccgggcatagtcacatgcctgtaatcccagctactgggtagcctgaggcaggagaatcgcttgaacccgggaggcggaggcggagtttgcagtgagccaagatttcacaactgcactccagtctgggccacaagagcgaaaacccgtctcaaaaaaaaaaaaaagactaggatttgacataaggcctgaggggtattcttttgttttgttttgccttgttttcaagaggccaaaatcttcacagttgaaaatttctgttgaaccacagagatttgaaccaactcagtttagaaagcctggggatttgaacaacggtatggatcggaaatctcttcatctgtcagttttcatcattctaggcagtaaaatagatttccctttaggagcttttcaccgtttggggttctccagcagtgggatgtggggaatcaacccttcttcgtctccacccaaacattaggtgggagcaaggggtgggaagtagagaaagtggatagaggtctccagtggatatgggatctttgtgtagaccagcacagtcctcagaaatctcatgcaagcaacataggtactgttatattttctagtggccaccttttaaaaagtaaacaggtgaggccgggcgcggtcgtcacgcctgtaatcccagcactttgggaggcccaggcgggcggatcacgaggtcaagagatggagaccatcctggtcgacacggtgaaaccccgtctctactaaaaatacaaaaattagctgggcatggtgacgcgcgactgtagtcctagctactggggaggccgaggcaggagaatcacttgaaccctggaggtggaggttgccacgctccactacactccagcctggcgacagagtgagactccgtctcaaaaaaaagaaagtaaacaggtgaaattaattttaataatatattttgtttaacccaacgtatccaaaatactatcatttgaaagtgtaatgaatataaaaatattcatgagatatttttcattctcatatccatactgtcttggactctaatgtgtattttacacttacagcacaattaatttgggactagctacatttcagctcaacaatagccaatagcatatgggatagcgcaaataaactctgcgtctctgttgcttctttgggtctcggagacctcaaccctttcttcagattgcaaaccttcttgccttcaagcctcggctccaacaccagtccggcagaggaacccagtctaatgaggtacgctcccttcctgccattctctattccattaacctgtttcgtggtaaacgtaggactgatcctccaaaattaccttattaattagcttacatatttattatctatctgtcccaccagaatgcaggtttccggaaggcagggatttaaaaaaatctgttttgttctatgtgattttcccataccaagcaccgtgcccggcacaagctgggatcccagtacacatctcgggacggaagaaccgtgtttccctagaacccagtcagagggcagcttagcaatgtgtcacaggtggggcgcccgcgttccgggcggacgcactggctccccggccggcgtgggtgtggggcgagtgggtgtgtgcggggtgtgcgcggtagagcgcgccagcgagcccggagcgcggagctgggaggagcagcgagcgccgcgcagaacccgcagcgccggcctggcagggcagctcggaggtgggtgggccgcgccgccagcccgcttgcagggtccccattggccgcctgccggccgccctccgcccaaaaggcggcaaggagccgagaggctgcttcggagtgtgaggaggacagccggaccgagccaacgccggggactttgttccctccgcggaggggactcggcaactcgcagcggcagggtctggggccggcgcctgggagggatctgcgccccccactcactccctagctgtgttcccgccgcgccccggctagtctccggcgctggcgcctatggtcggcctccgacagcgctccggagggaccgggggagctcccaggcgcccgggtgagtagccaggcgcggctccccggtccccccgacccccggcgccagcttttgctttcccagccagggcgcggtggggtttgtccgggcagtgcctcgagcaactgggaaggccaaggcggagggaaacttggcttcggggagaagtgcgatcgcagccgggaggcttccccagccccgcgggccgggtgagaacaggtggcgccggcccgaccaggcgctttgtgtcggggcgcgaggatctggagcgaactgctgcgcctcggtgggccgctcccttccctcccttgctcccccgggcggccgcacgccgggtcggccgggtaacggagagggagtcgccaggaatgtggctctggggactgcctcgctcggggaaggggagagggtggccacggtgttaggagaggcgcgggagccgagaggtggcgcgggggtgccaccgttgccgcaggctggagagagattgctcccagtgaggcgcgtaccgtctgggcgagggcttcattcttccgcggcgtccctggaggtgggaaagctgggtgggcatgtgtgcagagaaaggggaggcggggaggccagtcacttccggagccggttctgatcccaacagaccgcccagcgtttggggacgccgacctcggggtgccgtggtgcccggccccacgcgcgcgcggggctgaggggtcgggggcgtccctggccgcccagctttaacaaagggtgctcctctccaccccgcgaggaggggcagctccggagacccggtcttcagcgagcggggtcttagcgccggggaggtctacttccttttggggttgccattttactattattattgccttttttttttcttcaaaagg

SEQ ID NO: 25 - DNA, 5286 bp, Homo Sapiens
catcctttgcccactcagactttctttctgcccacctgctgctgtgaatcctgtatgtcatatatatatataaaatatgtaatatattatatattatatgtaatatataatatataaagtatattatataatatgtattatattatatattatataatatgtaatatattatataatatataatatgtattatattatatattatataatatgtaatatattatataatatataatatgtattatattatatattatataatatgtattatattatatattatataatatgtattatatattatataatatgtattatatattatataatatgtattatatattatataatatgtattatatattatataatatgtattatatattatataatatgtattatatattatataatattataatatgtattatatattatataatattatataatatgtattatatattatataacaatatataatgtgtattatatataatataatattatataatgtgtattatatattatataatattatataatgtgtattatatattatataatattatataatgtgtattatatattatataatattatataatgtgtattatatatataatattatataatgtgtattatatatataatattatataatgtgtattatatatataatattatataatgtgtattatatatttaatattatataatgtgtattatatatttaatattatataatgtgtattatatattatataatattatataatgtgtattatatattatataatattatataatgtgtattatatattatataatatatgatgtgtattatatattatatattatatgatgtgtattatatattatataatatatgatgtgtattatatattatataatatatgatgtgtattatatattatataatattatatgatgtgtattatatattatatataatatataatattatatataatatattacatataatatatcatatattatatttatataatttatataatatatcatatattatatttatataatttatataatatatcatatattatatttatataatttatataatatatcatatattatatttatataatttatataatatatcatataaatatattatatatagtattatatatataaaattatactttaagttctagggtacatgtgcacaacgtacaggtttgttacatatgtatacatgtgccatgttggtgtgctgcacccattaacttgtcatttacattaggtatatctcctaatgctatccctccccgttcccctcaccccacaacaggccccagtgtgtgatgttccccttcctgtgtccaagtgttctcattgtttaattccaacctatgagtgagaacatgcatgtcttatatgctctcaggcagagaggaaactgctgagcaggccggggcaggggacagagccctgtggctctccactttagacccctcctggctgactgccatggaatgcagccacttagcagggccaaatcccctgatgttcctgttggctgtctagccttcagggacaggtcatgggaccttggttcctgccctgtcatcttcccagtcaccctgatcttcacggggaggaatagcctgggaaaggacttggtcacagcacctccaccctagggctattgaggatctcacagttgtgtgtctggtgggttctgtccagagcccatttgagagcagtggatgacaggacaggcctatgtgacccaggcaggcagcaatattgggtcagccttcatgtccccttctgtcagctggggcagcctggaagcatgattgtggggtaggtgttatgggcacggaatagacctcaggtggaggctgcaggggctctccggcaccgtagacacagcaggcccaggagcaggggagggagccatgactcagggagactctggcccatatccttggcagatgagggccacaggggaatgggcagcactgtccaaagtcccctgggctgggtccgcagctgttcctggctcagacttcttggtgggctggtcagaaacatgcagtaacttggggcagttaccaggtggccaagcctgcactgctgggctctgtgagcttgggccagctcaggccctctctgggccctgcctttctgggctgttcgggtggttccttgggcctggggtgctaatgtttctggatgggcagcagaaccagtctgcactcagggccccaggccatgttcccggaacacacctttagcattgacagcagcgtgtggtgaggccccttaggctgggttctggtctagtgccaggggcaccactactccaccgcctccagagccatctctgggacactggctgtgagttcagatgttctgaacagggacagggagagccagagggaaccagcctggggctcactggaggggctcgtgggcagacagcgccctttggagggaactgagtctgaaaggaaggaaaccctttccccggctcatagcacctgccatccagggccctcccagggctgcgtgaactttagtcacgtggtgacaggccgagtcaccatgccaagtcactgtgcgcctccttgctgctgtgacgtcagcttccccatcctcccagccaggctggacctccgtgagaggcctgcctgtcctgcaccctgtgcagatgcctcccactgtccgccggggctgctgggcacgccctggctggtctcttggactaggtaagctcatgagtcctctggccgctcctgctccttccctgcctctgctcctcctcggaggtggccacccccagatcccagtcccaattcggaggccccctgaggagtgctgcagggggccacaggcgtggctctgagccactctggagagtggcggggggcccagccagttctgtggctgggactttcccaggcagacaagtctgtctcttcctccccagcgggtgcagcccagaactgtcttctgaggaagaggtgctctcctgggcccccactgtccccaggcctcaggtaagcccatcagggtcccaaggaagggggtctgggtttgaggccaaccatggcagctgacctactttctagcctcagtttcccctagtgtgtgcagctctcacgctgtttgggtgagaaccaggcctctgggcttggacattctttcagtgagtttttagggtggagggatgggaaatggaagcccaggacctcagcagggtgtcttcctccgatccggggacatctgcctgtgggaggctgggcccaccctcccttgctgacctgccctgggaggaagggacagggcccagcactgcctactcccctccctgttcttcccagcagtctgagcctggctgggtgtcccctgctcctccagcagcctacttgggcctttgggtagacagattaacagacaggcgaggctgggtcatggttggaccaccccaggaccctgaccgggggctcagctcatgaccctgagcctgggagagatgaggccatgccctccagggcactcagcatgacccggcccagtggacgggactgggtagcttccttggtgcagggggctgtcatgctaggacggggtcactgaccaggccaggcccctgccccatgacttgtggtggaaatgtccttttgtttttgtttttttgcattttttttgagacggagtttcactcttgttgcccaggctggagtgcagtggtgcaatcttgcctcactgcaacctccacctcctgggttcaagcaattctcctgcctcagctcctgagtagctgggattacaggcacctgccaccatgcctggctaattttttgtatttttagtggagatgggggtttcaccatgttggccaggctgttctcaaactcttcacctcaggtgatccacctgcctctgcctcccaaagtgctgggattataggtgtgagccactgcacccggccatgtgatgggaatgttctgtgtccataatagatgctgcatattgctggcccagctcctgaggctctttggacctccaggaatcggtgtctctatcaggaacccttaaccctgacccggactcccagctgggacccggggtgtcggagtggcaagagcgctgtcaggcctggtgaagggtgtgagctgtccaacggggcagggaggaggcagggcctgttctgcagttggacagacagagccctctagctgctttctggaagactgaagggcaggtgatgttggagggagggagtgcaggcaggggctgtgagggagttcaggtcagaaacaggtggcgcctggattcaggctgtggtggtcacggtggggatgaggggctgctttggattgtgctggggatgtggggtggtgcgctgctgcatgactactgccaggtctctctgctcttagtgtctgcatccagggctgggagggggtcaaatgaatcacactatcggccccaggcccaccaagcctggggaggtggccacccttccatgatggcatttggatgttccctgtgtgtggggagggcacagggactccattcgtagaccacctctgggacagtgtgtctgcctctgaggtcagacgctctgcactgggacagggtggagtggagggaaatccagcttggggctcattggaggggcttgctggcagacaccgccctttgtgggaaactgactgtgggagaggggaaccccaacctctgtcaccacatccctcttccctgttgtcacacctgtcacctgctgccatagccatgagacttcccaagggtcactgctgccactcactgcacagcctggaagggagtccacaggggacatacagtgagcaagagacctgtgccactcaggcctcctgggggtgtccccagtgcagccatgatgataatcacagctaccattcaccaagccctgcccacagtctaacctactctattcacaacactcccagcagcaaggcaagtgaggtgctgccgtcatccaggctggacagttcagtgatttgcctgaggccccacagcaggtgagtggcaagtccagcatcagagcagggcaggctggcggtgccccctgagccccctttgccatgctgaccacatgcacatcctgggcttctgcaggaatgccctgtcccctacctgccctgctccgtgcaaaaccctctttgagctgtgcctgggagacatgctgagagaattcatggaaacaaatgtgttactgacagcctctttgcctccaga

SEQ ID NO: 26 - DNA, 5649 bp, Homo Sapiens
cggtggctcacacctgtaatcccagcactttgggaggctgaggcaggcggatcacaaggtcaggagatcgagaccatcctggctaacacagtgaaaccccgtctctactaaaaatacaaaaaattagccgggtgtggtggcgggcgcctgtagtcccagctactctggaggctgaggaaggagaatggcgtgaacccgggaggtggagcttgcagtgagccaagatcgtgccactgcactccagcctgggcgacagagccagactccatctcaaaaaaaaaaaaagaaaaaagaaaatatcttaagctttgaggaccacatagtctctgttgcaatcactcatttgggccactgtagcacaaaaacaaacatagataacacacacatgagtgagcatggctggggcccaataaaactttatttacacaagcaggtgatgaaccacggtccatagtgtcccaatccttgatttagatggtgaactatcatgagctttcgttgccctctccggtagaaatatgggagaaaccacagagagaaacagagatttcaggaaaacagtaaaattaaacaaataaagtgagacgtcgcccctcctggaggctgcaggctgtgttgaacctgtgtgtgtctgggtgtacagggatgtgagtagatgcgcgtggagatgtgtgtgtgggtggagactgagcgtggctggaggtggctgtggtaggatgccagaaggaaggagtttgcattcagttcctttattagtactctctggagttgttgaggggatgtcactgctgaacactgaccctggtgcaggctaaaccgaagttagcctctgctaccctctgctgggtgaggcactggggagaacagtgggactgaatggggcgggctttctccctcccacacttcccctggaaacacccagcaccagcacattagaacatggggagccaccttccccagcgctgcttcccaaggttcggaaggggaaactctgacctcaagctctgtttgaagagcgatagcaaaggggagaggttggctgtggtttggtggtgcttatctccttcctttgctttgaaaccacaggctggcatactacccgagagaatgaccagtgccaccaagggaagggcacaagctcactggttccaggggagacatctcaggggacaggaacatcccctgacgctgaatgagtgcagcacacagacggagaatacacacaagagaaatcatgaggacatgagagaaggcactggcaataggaagttacaaaaagcaacaaaaagaaagagtagatataaaaacaataatcgaagaaagccaacaacagatgggatgaatcatacgaggtatgcgactcatggatgaagaggtgagtgatgagatcagctggggaactctctcccaggaaagacaaaccagaagaaacacaaatgacatcgaagtggccaggcgcagtggctcacgcctgtaatcccagcactttgggagcccgaggcaggtggatcacttgaggtcaggagtttgagaccagcctggccaacatgatgaaaccctgtctctactaaaaatacaaaaattagccaggtgtggtggcaggcacctgtgatcccagctactcaggaggctgaggcaggagaatcacttgaaccaggaagcagagattgcagtgagctgagatggtgccagtgcactccagcctgggcagtagagtgacagcctgtctaaaaaaaaaaaaaggcagtaaagtgataggaggatagattagaagggccattttccagatagtgcaaggaagaaagaagaagaagaagaggaggaggaggaggaagaggaagaagacggagaagagggcatctcagaagaaacaatggagatacatttctcaaaactgaagaaagatgaccaacctcagaccgaaggccaagaggcaaaccagagagacagcttggcaagccaggaagagcaccaaagctagacaattagagtgaaattaaagaaaacccaaggtgacaaaaatttaaaaagcttccttgtgacctcagtccattggtgaaaatttaaaaaaaaaaaaaaaaaaaaaaggacagcctgggcaacatggtgaaaccccatctctacaaaaaatacaaaaattagctgggtgtggtggcacatgcctgtagtcccagctattcgagaggctaagtaaggcaggaggatcacttggggccaagagttccagaccagctgcggcaacatacatgttgtgggaagtcaggcaccccgaacggagggactggctgaagccatggcagaagaacataaattgtgaagatttcatggacatttatcacttccccaatcaatactcttgtgatttcctatgcctgtctttaatctcttaatcctgtcatcttcgtaaactgaggatgtatgtcgccttaggaccctgtgatgactgcgttaactgcacaaattgtttgtagaggacaattgttgtgtgtttgagcaatgtgaaatctgggcatcttaagaacaggataacagcaattttcagggaacaagggagataaccttaaagtctggctgcctgtgggctgggcaggacagagccatacttctcttattaccgcaaacaggtaagagaaatatcgctgaattctttccccagtaaggaatattaataattaacagccctgagaaaagaatgcattcccagggccgggccactgaaatggcctccctgagagtgcctgcctttattcagaagtagaaagggatgaaacacgccctagtctcctgcagcacccccagacttgataggattaggaaattccagcctggcaaattctagtcagaccggttctctgctcttgaaccctgacagtgcgtgccagtgggacctggaagttcattagtgattctagtttcgccgtgaccttctgccctgtgatcttttgtcgcccttgaagtatgtgatctctgtgacccacaccctgttcgtgcactccctcctctttgaaaattgctaataaaaactcgctggttttacggctcagggggcatcacggaacctgcggacatgtgatgtctcccctggacacccggctttaaaatgtctctcttttgtactctttccctttatttctcaggccagccgacacttagggaaaataggaaaggacccacgtgaaatattgggggctgaatttcccccgataataagtctcttaaaaaagacttttaaatgaaatttctttgttttttaacttttatttctgttttgggggtacatgtgaaggtttgttacataagtaaactcgtgtcttcggtgtttgttgtacagaatatttcatcacccaggtattatgccgagtacccaatagttctcttttctgctcctctccttcctcccatcctgcaccctggagtcaaccacagtgtctgttgtttccttgtttgtgttataagttctcatcatttagctcccacttacaagtgagaacatccagtatttggatttctgttcctgcattagtttgctaaggataatagcctctagctccatccatgtcccacaaaagacatgatctagttctttttaatggctgcattaaatgaagttttaaagatacaacataaacaccaacctcttccccaccacaaaaatcccttgctgaatttgattacacttaaattaacgagttttgtttcatgaaagactccttggacaaacttgacagttgatggaataggagaagctgtctgtcatgtctaaagccaacaagagatcaatatctagaataaatggagatctgcaaatcaacagaaagtaggcagcaaagccaaagaaaatagcctaaggcacagccactaaaaggaacgtgatcatgtcctttgcagggacatgggtggagctggaagccgttagcctcagcaaactcacacaggaacagaaaaccagcgagaccgcatggtctcacttataagtgggagctgaacaatgagaacacatggtcacatggcggcgatcaacacacactggtgcctgttgagcggggtgctggggagggagagtaccaggaagaatagctaagggatactgggcttaatacctgggtgatgggatgatctgtacagcaaaccatcatggcgcacacacctatgtaacaaacctgcacatcctctacatgtaccccagaacttcaaataaaagttggacggccaggcgtggtggctcacgcctgtaatcccagcactcttgggaagccgaggcgtgcagatcacctaaggtcaggagttcgagaccagcccggccaacatggtgaaaccccgtctctactaaaaatacaaaaatcagccagatgtggcacgccacctataattccacctactcgggaggctgaagcagaattgcttgaacccgagagcggaggttgcagtgagccgccgagatcgcgccactgcactccagcctgggccacagcgtgagactacgtcataaaataaaataaaataacacaaaataaaataaaataaaataaaataaaataaaataaaataaaataaaataaaaaaataaaataaaataaaataaaataaaataaagcaatttcctttcctctaagcggcctccacccctctcccctgccctgtgaagcgggtgtgcaagctccgggatcgcagcggtcttagggaatttccccccgcgatgtcccggcgcgccagttcgctgcgcacacttcgctgcggtcctcttcctgctgtctgtttactccctaggccccgctgggacctgggaaagagggaaaggcttccccggccagctgcgcggcgactccggggactccagggcgcccctctgcggccgacgcccggggtgcagcggccgccggggctggggccggcgggagtccgcgggaccctccagaagagcggccggcgccgtgactcagcactggggcggagcggggcgggaccacccttataaggctcggaggccgcgaggcttcgctggagtttcgccgccgcagtcttcgccaccagtgagtacgcgcggcccgcgtccccggggatggggctcagagctcccagcatggggccaacccgcagcatcaggcccgggctcccggcaggctcctcgcccacctcgagacccgggacgggggcctaggggacccaggacgtccccagtgccgttagcggctttcagggggcccggagcgcctcggggagggatgggaccccgggggcggggagggggggcagactgcgctcaccgcgccttggcatcctcccccgggctccagcaaacttttctttgttcgctgcagtgccgccctacaccgtggtctatttcccagttcgaggtaggagcatgtgtctggcagggaagggaggcaggggctggggctgcagcccacagcccctcgcccacccggagagatccgaacccccttatccctccgtcgtgtggcttttaccccgggcctccttcctgttccccgcctctcccgccatgcctgctccccgccccagtgttgtgtgaaatcttcggaggaacctgtttccctgttccctccctgcactcctgacccctccccgggttgctgcgaggcggagtcggcccggtccccacatctcgtacttctccctccccgcagc

SEQ ID NO: 27 - DNA, 1631 bp, Homo Sapiens
ggatccagaacatggggcggactcaggcagcggcgggaatcaggcggactcgtttggaccgaagcctccgccaggcaccgaagccgtgaagtcgcctgcgcagcaaagggagcctccggggggcgcccgagaccttggtgtcgctcgggggccgctggtagccgcgcccgctgcccctcgcccggtgactcagccggtacctctggcggggccatgggggccagaggacagcgcggggggcggcgagcgcggttgctaagctctccaaggcctcggagggacaggatctgggcgcacctcaccggttgccatggtaacgcagcgccccagcccctcgcgctccgcggtggagggaggcgcagccaatcggaagcggcggagttctcggggacccccccccccccgctccacgccgtgtgtgggcgggggtcaggaggtgcggggcggaggcggagcgtgggccgcggagatccggcgttcgcaggaggcttggtgcgcggcggggctgcacggggccacttccggagtagtactgcgagcagcggcgcgacagtgcggggtcccctttctcccagaagagacgtcacccacacaaacctgaccttcacgtggggcgcgggaccttgcggggtcccagccgcaggcgcccctgttgtttccttcgggcgggtgggttggagaagaagtccacgcgggattcttcaaaacggcgtacagggggattctagggccccatggttacttctttggaccccccggaggcgctgtccagccacttccagtcgccctgatgactcgtcgtgggttcctttaggagacccgaaagttcagggcgggctgtgtgggtaacacctctgcccaggttcccggagggccctacgtggctgcccctggagtatcccagagcgctagggctgcgggaaggggcgggtgtgcttctggaaacatgagcgcctgttagtatcagtgcctggatagggctggggacaaatcagtttatgccgcgcacaccgaatccatgcgcctgagtgagggtgggtgtgttggggagtgcgtccaagtggacagtgccgtacagtaatgtctacggggagttccaggagagctcggctactcctgcgcaggataacctctcccccaccacccgagtcccgtgctcgcgggcaggacttttccgaactggggctgtgtgcctagaaatacgtacatgggagcgctcagctcaaagccccagggtttctgggactcgcgtgtccggggtcggggtcccaggtgggtacaggtgggagggcgaacctgcgggtagggtgggcccctccccgcgggctcagcatctgtgcgcctccagctcaggtgcgcgggaggaaggcagcggcctgccgcgcagagccctgcgcgcccgcgaggtggcgccatagccgcagcagcgcccgccggcccgggccgctccagataagagtgtgcggaaagcgcggcggggctgagacgcgaccaggacgcggggaggacggaccagcaggacagaccgaccgggggcccggcgggcggagggcagcgcagccacgtcccccctggatccgccgtcagccgggcccggggctttcgacatgccccccaggtgggtcctcgag

SEQ ID NO: 28 - DNA, 6680 bp, Homo Sapiens
cctacaagtttgcttgtgtacacatgaagaaactcctggatacacaggaaactgattaacagagattatggtgggggagtggttggtagagaacttggaagataaggagggcttcttatactttatttttaaaccatgtgaatgtgttacctatttaaagtgttacatgagagcttctgaccagaggctacatttcccagcctgtaagaatggccaccctataggctgcaaatctttatgagaaataaagctctcctttccaaatttatgaacagaccaaccagcccaaggaacatctcactgattttaaattggatcttctcggcttagcgactgaagactgacacagcccgatcgcctcggaagccccctgggccatcatggacgccgagcttcgggtaactcttacagtggaggacaggaatgtcaggcctctgagcccaagctaagccatcatatccccagtgacctgcacgtatatatcaagatggcctgaagcaactgaagatccacagaagtgaaaatagccttaactgatgacattccaccattgtgatttgtttctgccccaccttaactgatcaatgtactttgtaatctcccccacccttaagaaggttctttataatgtcacccacccttaagaagtttctttgtaattctccccacccttgagaatgtactttgtgagatccatcccctgcccccaaaacattgctcttaactctactgcctatcccaaaacctataagaaccaatgataatcccaccaccctttgctgactctcttttcggactcagcccgcctgcatccaggtgaaataaacagccttgttgctcaaaaaaataaaaataaaaataaaaataaaaaataaagtgttaaatgaattgaatttaaccccatgggaagagttaacccagtaactacaatttccatcaaagggtgaaagtctaatagtcattcactcattcaataacctatagcaggccaggcaccgcggctcacgcctgtaatccctgcactttgggaggccgaggcaggtggatcacctgaggtcaggagtttgagaccagcctgatcaacgtgatgaaaccccatctctactaaaaatacaaaaaattagctgggcatggtggcgcacacctgtaatcccagctactcaggaggctgaggcgggagaatcgcttgaacctgggaggcggaggttgcagtgagctgagattgcaccactgcactgcagcctgggcaacaaaagcaaaactccgtctcaaaaaataaaaataaaataatctatagcaatcaggaaacatctctagcaatgatacctaacaagtgcacagcactttaaatgtgccaggcattgtgctgttttcatttacattatttcatttaatcctcaccactcccagagtgcaagtgtctaatatcacagaagagacagaagatcacagaaggatgagagaggttgttctttttttttttttttgtgagacggagtcttgctgtgtcgcccaggctggaaggcagtggcgtgaactcggctcactgcaacctccacctcccaggttcatgccattctcctgcctcagcctcgtgcgtagctgggactacaggcgcccgccaccatgcctggctaattttttgtatttttagtagagacggggtttcatcgtgttagccaggatggtctcgatctcctgaccttgtgatccgcctgcctcagcctcccaaagtgctgggattagaggtgtgagccagcgtgcccggccaagaggttgttctttcccaaagttctctgcaaacattcaggcgccatcatcctgggccaggcctgaggatgggcactgcactagggataccaagacaaagacagcaccctgccctctaggacctaatggtctagtgagggagatcgatgtgtaaaacagcagactcatagacaggttttgaatagagaagggagtgttagagcatagtgcttgaggattaggagacaaagggaacagagagaccggggacaacaagcaaacctctcccacgacaccctttggccgaggacaggcctcgaaagcagctgtggaacttggaggcgccatgtgggagacaaaccctgcagcctcaagcccaacaatgaacaaaggctgccgggctctctggcaggagaggagatctgacaacggcctggcccgccgtttgatcagtgtagacattccttctagactttgaagcctgaagtgctctcctttagctgtctacacagatcaaataagctggatgactgccctatctccacttcgttgtgtggctccatagtcacagccagctccataacaatccaaccaaaccatctgagcagaagcaaaaataattcttatgggcaaagatagacagttccaagatgtgaacattaactccttgctgccacttcagaagagagtggatcttgaagttcgttttaggaagctttcgagaagggcgattctgcccctctccaaggtgaagtggcaaaactgttgtctctccttacagttgaaagcccttcctattccaaggcttatataggacacccacaaaagctgacaataatgagctgtgatctggctcttgggaaggcagccccaccctaaagaacaaggatcagactgggtgtggtggctcatgcctgtaatcccagcactttgggaggctgagacaagaggattgcttgaacccaggagttcgaggccaacctgggcaacatagtgagaccctgtctcaattttttttaagtcaaataataataataataataataataataataataataataataataataaaaggacaggaatcccacctcaaaagcacctttttattcaaaggctcattctaggggaaactttaacccagccctctcagtcctcaagcagctgtgaggagcttggaacattgtcacagactggcagaaccaggcatctcccaacaaacccagaagccaagtggcattgctaaaaaagattaaaaatgaacatgagttctaacatctacgttccttgctatggtttccatggaaatagacatctgctctagggagaaagaaaatgtggggggaagcagtgtaagtgctttcaaattatcagtgttttgaaagatttatttcttttttctgtcacaacattaatagtcaggaatgtgagacttttgtgtggcaatttattgtacttaaaaaaatgcattaaatgagtgggaccttcctctgtgaacctccagatcaaatacaaagacttcaagataaaaagcctgttcagtgggtaaggacctcttgggcttgggttccttgctcatttgtgttgcctgcctatctgtcgctttcctgaggggtctcatgcccatccttctccaacttttctaatgatgtctgagattctgttcagaaaaatgacagacggaagcacctagccattttgaagctaagtttggtctgagaagaagcctttcaaggctcagtatctgaattattcctggtcctgctcacaggctaagtgaaaaccacttcgattggcttgggggggaggccgaccccacacaagggcgattgttggaaaaaatgccgcaacaagcatatttcaggcaacagcgcattgctaattgtttgctttgtgtagtgtgctgctgcttgtatgatccagtttttattgtcttgggcaccccttagttgtattttatctctggcacatccctggtgactaactaggcatgagagtctttctaaattaggactgttgtttcaggaaggttggtcacatttgtttcttgatttggggagatgcagctcattaataaaataaagatatctcttctgcttagtcaagatctcaaagcaggtgtcttggtgtattgaccaccaaccgaggacacggtcttggtcagagaatgggaggaggcggggaccatgttcatttcatttatttttttcccctttttgtgagagaaagggccagttattctaaggcacggtcagaccaatttcctttgtgcctttgctgaggttctgagctatccaggtcagggagaacagtgaccttgtggctcctttttcgatttttaaaaagaacccagtgctgctctggggagcacgtgctctgagaacaaaagcaacacttaactgcaatctgtgtagtctagaacggctattgctcttcctcccctatcatccgcagaaggcttggaagaacagatggagtctgcatttaagctgagtggctttgttagaccaaaggcgatcaaattccagagccccacgctttcccgcacaggtccctggtcaccggctcgggaacctgaggatgctggcaagaacgcacacagtgagggaagggccacgcccgcgacctgtgggctgagtggattagaaattacgatgatgtcacaatatgggtgacacgccggtgtcggtgtagggtgccgggggcagggggccctgcaggggcgtggagtggcattgtgctgtcacaggggctcgggcgtcttaggcacccatgtgggtggcgcactagaaggggcactgctctgtccgagtgctgcccttggggcgaggcgggcatgtggctctacaaggtggagtccaggcggccaaagtttggaaaggtagggaaggacccccccgccctccgcctgctccgccctgcccttgttctcgagaatggggagctggttcggacctagtccggggtccactgccacgccctcttccacggcgagaccacccccctagtcccaggcccacacctggggatgctccccaggcgccctgcaacccccggcattgtcctcctgccctccgggacaggactacacttcccgaggtgcttcggggtcccggggggcggcgctccacgcgggttgtggggggcgggggcggcacgtgccgccgctctcggccaatgcggagccccgcgcggaggtcacgtgcctctgtttggcgcttttgtgcgcgcccgggtctgttggtgctcagagtgtggtcaggcggctcggactgagcaggtgggtgcggggctcggaggaggcggcggctggctgaggccagcaagagggacgcggtcggcgggaggggctgggccgtggcagcgaccccctgctgcagggcggcgggcggggctgcgggcctcggaggggttggtgggcgggggtcgctccgctttgtgtgtggctcgggcggagcctcgcctttgtccccgctctccgggggcgcggctgttcgtgggcagggggctgggcgatcaccgggcgtccgctccggggtgccgtcgaggagacaatagggggcgtgggccctcgtttacctccctccctccctcccttccctgcgggccccgccgggttccccattgtctgaagggacggggcggtgccccagggaccagcggctttaggaccaaactgcgggcagccagggccgcgaccctccctgcgaccgtcccctggcgaccgcagctggtgattgaggggcggcgctcccgggccccacgagggttcttctgtcttcgcggccggacgcgcggacagcgtgggtggcggcaggttgggcatggggacggcgggaggcggtggcgagctcaccgcgggaccacccgggggcctgttcccggggcctgccccacccgctgaactgtgaagggggtggtggcggcggcctggaggtgtttttggcgggagttggggggggcgtccgcgcagggggagtcaggcaggggcggagttacccggattggaccgttagccccgcccacccctccccttcccacgcgcgcgggctccggggtgttgagttcggggagattcgaaaaggcgcggggaggaagggggcggggccaggggccggagcgcaaggcgtgctctgattggccgggggcgaccggtcctcttttcctcgcccggaccagggccacgcccatcctgggtccggtgctgcgtctaattctctgcttttcttaaatcttgtcgctgcctctgattttaattcctagcttttgggaacctgtcatcctacgtttttggtactagctggcgtctacaaaagtcataatgttaaaaagatcaacaagagatacagcatttttcatgacataacggcagcaaatataagtcaaaatctagaggttcataaacattttgcttgctgttgggcaaggaagcttaaacctgagggacaataggagttcaacattattggttactattagcttgggcgttttcttatccaccacgtcagacacagacaaagcaggggtgggtatttcatttgcacaatgagttgtaggcagtattaagatggctccgggggcactgttgagttgaatctggaatatcttcttacagtttcggtgaaatgttaaagagtttatgggggaaaaattcttcacccttgtgactttgtctgattttaaaaatccaagagttttatgaccgagaaagctcagttaacttgattttctggaaccaatatcatattcaggtcatatttcccaatgtttatttagtagattttgataatttttttcgtggttaatttagacgtctttattccacgtatttttctgacgatgtatgtagatgtgatgtgagatttttttgggttgatgacatatagaaaggcaaagaaagtgattgcatgtttttgaaaatcattttcagg

SEQ ID NO: 29 - DNA, 16842 bp, Homo Sapiens
cctcccaaagtgctgggattacaggcgtgagccactgcacctggcctgttatttatgtatttatttttttttgagacaagttcttgctatgttgcccaggctggcctcaaactcctaggctcaagagatcctcccaaagttctgggattacaggtgtgagccactgtgcataaccctgaagtggttaattttaataatacatttactttagcctaacatatccaaaattacatcatttcaacatgcaatcattattaaaattattaatgagatattttattttatttttatttatttatttttttgagacggagtctcgctctgtctcccaggctggagtgcggtggcgcgatcttggttcactgcaagctccgcctcctgggttcacgcctttctcctgtctcagcctcccgagtagctgggattacaggtgcccgccaccacgcccagctaatttttgtatttttagtagagaccaggtttcaccacgttggccaggatggtctcgaactcctgacctcgtgatcagcccaccttggcctcctaaagtgctgggattacaggcgtgagccactgtgtctggccagtgagatattttatttgtgccctttttttttttttttgagaccgagtctcactgtgttgcccaggctgcagtgcagtggcacaatcttggctcactgcaacctctgcctcccaggttcaagcgattctcttacctcagcctcctgagtagctgggattacaggcgggcgccacgacacctggctagtttttgtatttttagtagagacgggggttttaccatgttgcccaggctggtcttgaactcttgacctcaggtgatcacctgccttggccccccaaagtgctgggattacaggcaaaagccgccataccaggcccatttttttttctttcgagacggagtctcattgttgcccaaggtggagtgcaatggcaagatctcagctccctgcaacctctgcctcctgggttcaagcgatcctcctgcctcagcctcccaagtagctgagattacgggcgcccgccaccacgcctggctaatttttgtatttttagtagagacagggttttaccacgttggccagactggtctcaaactcctgacctcgggtgatccatccgcctcggcctcccaaagtgctgggattacaggtgtgaactaccgtgcctggcaggcccatttttaatttttctaactttggaaattcagtgtgtagggcaggcatggtgcctcatgcctgtaatcccagaactttgggaggccgaggcaggtggatcacctgaggttaggagttcgggaccagcctgaacaatatggtgaaaccctgtctctattgaaaatccaaaaattatccagccatggtggtgtatgcctgtagtcccagctactccagaggctgagacaggagaattgcttgaatctgggaagcagaggttgcagtgaaccaagatcatgccattgcactccagcccgggcaacagagcgagactccgtctcaaaaaaaaaaaaagagagtcagtgtggagggaagtgtctctgttgggtccgggtgctctgtgggactctgaggaaaagctcgcaccaggtagatgctgttctgtccccatgggtaaaggacaccccaacaaaccgaggagcaaaatgtcctcgtatgccctcttcgcgcagacctgccaggaagagcacaagaagaaacacccggactcttctgtcaatttcgtggaattctccaagaagtgtttggagagatggaagaccacgtctgcaaaggagaagtgaagtttgaagagaaggcaaaaagtgacaaagctcgctgtgacagggagattaaaaattacattcctccgaaatgtaagaaagggtaagaaaggaaagaaaaaggatcgcaatgctcctagaaggccaccatctgccttcttcctgttttgctctgaacatcgcccaaagatcaaaagtggacacccaggcctatttgtcgtggaaactgcaaagaaactgggtgaaatgtggtctgggcagtcagccaaagataaacaaccatatgagcagaaagcagttaagctacaggagagatatgaaaagggtattgctgcatatcgtgctaagggcaaaagtgaagcaggaaagaagggctcaaagaagaacaaaccagaagatgaggaggaggaggaggagaaagaagatgaagatgaggaggaagagggtgaagatgaagaataaatggctatcctttaatgatgcctgtgcagtgggcttgttttgctaagaatgtgaattctagtacagctcagtattagcttcagtataaaactgtacaaattttcgtatagctcataagattctctgtacagaaaatacttttcttttcttttcttttttttgagacagagtttcgctcttgttgcctaggctggagtgcaatggcgtgatctcggctcaccgcaacctccgcctcccgggtcctggttcaagcagttctcctgcctcagcctcctgagtagctgggattacaggcacatgccaccacgctcagctaatttttgtatttttagtagagatggggtttcaccatgttggccaggctgctttcaaactcctgacctcgtgatccgcctgcttcggcctcccaaaatactgggattacaggtgtgagccaccgcaccctgcctaatgtccctaaatatttaatggtttttaaaaaatttattgtgtatggcagcacagcacacttgtaggaattagtatcaacagtacatcttgcgttttttaagatgctgcattttttaacattttgtaataaaattatgcgtatcaaaaaaacaaagaaattccgtgtgtagttcacactcacagcacatctccgtccaggcacttgagagaatgactaggaggggttcttggaggaggtggtctttgaacggagaatccatcttcaaggattctgtctgtaatggtcaccaagtatttcctgagtcacttccatgtgtcctgcagttctctgaaggggcgtgggacctaccgatgccaattatccagcattatctccagattccaagaagttggggtgtgagccagcaatcagtacagaaaagagataccaaaataagtttgagttggggagtgttccttcaacttcagttttctggaagagatcttttttttttttttgagacagagtttcgctcttattgcccaagctggagtgcagtggcacgatctcggctcaccgcaacctcctcctcccgggttcaagcgattctcctccctcagccttctgagtagctgggattacagacatgcacctgtaatttctactaaaaatacaaaaattagccgggcgtggtggcgcacgcctgtaatctcagctactggggaggctgaggcaggagaatcgcttgaaaccaggaggcggagattgtaccaagatagtttgttccagctaaacaacctggcgctagtgcaggaaaaggtggaaggcacggggctagcacaggagggttcaatattttcaaccttatcaagccatattttggcaactcttgtttttcacgagaagcccccgctgggcttgtcccagcgctgtcctgaggcttcccccatgagttccgatagggcagaggccgccctgagcgtttctctttcccctggtccaagagtggctcaaaagaaggatttttgactggaattggccactttgtgttactttttgacccttgacctcgccccaaagggggatgcgggggaggggctctggtaggggtggccccgctccttccaggtccgcaagcccaggttcccgcccaccgggctcagcccaccctgcggccgttcagggaggccgttggcacccgtgacctacgacccccttcccgagccccaccgaggtcacagccgtggcctcgtctccccatgcctgcttcccgccccctgcccgtgacgggcgtctccgaggaccaatgagcgcgctgtatccacccctcgggcggggccaagcgccgaccaatcgccgctcgggcgcccggccgggtccaaacgctccaatcgtcagcggcggcggggcgggcagagggccggggatggcaggttcaaccaacgggtgggcacgtcgtcctcgcgaggaggcgtgccctgcggccgggcgtgcggtgtccgcggcggcgcagggagggggagggaggtaaacaagatggcggcggcgtgtcgggcgcggaagggggaggcggcccggggcgcccgcgagtgaggcgcggggcggcgaagggagcgcgggtggcggcacttgctgccgcggccttggatgggctgggcccccctcgccgctccgcctcctccacacgcgcggcggccgcggcgagggggacgcgccgcccggggcccggcaccttcgggaaccccccggcccggagcctgcggcctgcgccgcctcggccgccgggagccccgtggagcccccgccgccgcgccgccccgcggaccggacgctgagggcactcggggcggggcgcgcgctcgggcagacgtttgcggggaggggggcgcctgccgggccccggcgaccaccttgggggtcgcgggccggctcggggggcgcccagtgcgggccctcgcgggcgccgggcagcgaccagccctgagcggagctgttggccgcggcgggaggcctcccggacgcccccagccccccgaacgctcgcccgggccggcgggagtcggcgccccccgggaggtccgctcggtcgtccgcggcggagcgtttgctcctgggacaggcggtgggaccggggcgtcgccggagacgcccccagcgaagttgggctctccaggtgtgggggtcccggggggtagcgacgtcgcggacccggcctgtgggatgggcggcccggagaagactgcgctcggccgtgttcatacttgtccgtgggcctgaggtccccggaggatgacctagcactgaaaagccccggccggcctccccagggtccccgaggacgaagttgaccctgaccgggccgtctcccagttctgaggcccgggtcccactggaactcgcgtctgagccgccgtcccggacccccggtgcccgccggtccgcagaccctgcaccgggcttggactcgcagccgggactgacgtgtagaacaatcgtttctgttggaagaagggtttttcccttccttttggggtttttgttgccttttttttttcttttttctttgtaaaattttggagaagggaagtcggaacacaaggaaggaccgctcacccgcggactcagggctggcggcgggactccaggaccctgggtccagcatggaggtggtggacccgcagcagctgggcatgttcacggagggcgagctgatgtcggtgggtatggacacgttcatccaccgcatcgactccaccgaggtcatctaccagccgcgccgcaagcgggccaagctcatcggcaagtacctgatgggggacctgctgggggaaggctcttacggcaaggtgaaggaggtgctggactcggagacgctgtgcaggagggccgtcaagatcctcaagaagaagaagttgcgaaggatccccaacggggaggccaacgtgaagaagtaagtatggcttgctggggtcggggccgggccgggccagtcacggtgctgatggttctgtcttccttccttctctcctccctccctcccttacttcctcttaacaccctgagctggacccgtctggcgcctgtgtcctccgtgccagggagagcgtggttgggggcctgcgttacggactttcactcaggcaaggccagttgtcgcagcggggcgtgcgtttgcatgggctcttggactccagttaaaatgccctggtagcgaaaccctcctgagaagggagcggcccccaatcccctaagactagccccttggctcccccagctgtccaaggagcagaggcgcccagtggaatcagcctgtgtttgtttgggccccgagagtttgtgtgcggccgccaacacgttttctgcgcagtgtgtggccgttaccggggccaggcgaaatgtgatttgtttatcctgtcagaggggaaccctgggctgccaaaaataactgtttgcaccggcttatcagtcagcaggagggaaacgtagcctttcctcatttgccagggatgtgacgctggaagcatccctggcccccggggctggaagccctgcccgagggggactgtgcctccctcccgaattgcatccggaagaccttacttttccaactgacttcttcaggcacggggctgccgctgggcatcccggacgcctctgcatctgtgcgcggagaagctcctacctagggcagcactggccggcctgagcctctcccagctggtgggggtggccgggggtgtccctgccttatcgcagccagacacgctgcacctgccgccgcctggcgggccctgcccaggccctgctcctttcccagccttcttaactttcaaaactttgcctcctgtttccaagaaaggaccttatctgctgggctaggcctcgagggactggcaaggacaccctgcgcagggcaccatgaccttggaaggaggtccggggaggggctgctgcggtgtctgctctcaccttcctcctgctcaggggccctggggctcctgccgtgtctgctctcacctctctcctgctcaggggccctggggctcacgtacatttttttttttttttttttgagacggagtctcgctctgttccccaggctggagtgcagtggcgcgaactgggctcactgcaagctccgcctcccgggttcatgccattctcctgcctcagcctcccgagtagctgggactacaggcacccgccaccacgcccggccaattttttgtatttttcagtagagacggggtttcaccgtgttagccaggatggtctcaatctcctgacctcgtgatccgcccgcctcggcctcccaaagtgctggtactacaggcgtgagtcaacgcgtgcggcctttttttttttttttttttttttttttgagacggagtttcactcttgttgctcaggctggagtgcagtggagtggtcttggctcactgcaatctccgccccctgggttcaagtgattctcgtgcctcagcctcccgagtagctgggattacaggtgcctgccacagtgcccagctaattttttttttttttttttagtagagacggggtttcaccatcttggccaggttggtcttgaacttctgacctcgtgatccacctgcctcagcctcccaaagtgctgggattaaaggcgtgagccaccgcgcccggccagcacgcttcttaatcagcatgcaggctgtgacatgcggaaaccaggggcacaggctctgaagtttgtactctggagctggagcagtcagggttaaatgggagcggctgggaagggtgtgtttccacgaggcctttctgatgtctcagtgcccagtctggacccgggtagaaggtgtggccagtgccttgagtcagtggagcagttgcctgtgcctggtctctgtgagatgggttggtcaggggctaggcagagcctgtgcctggtctctgtgagatgggttggtcaggggctaggcagagcctgtgctgggggtagcaggtgccctctaaaggggccagtgacagtctctctcccagcagtgagaaacccacgcttaggggccgggcgcggtggctcacgcctgtaatcccagcactttgggaggctgaggtgggtggatcgcctgaggtcaggagttcgagaccagcctggccaacatggtgaaaccccatctctactaaaaatacaaaagttagccgagtgtggtggcgtgtgcctgtaatcccagctactcgggaggctgaggcagaacattgctggagcctgggaggcggagcttgcggtgacccgagatcgcaccattgcgctccagcctgggcgacacagcgagactctgtctcaaaaataaataaataaataaataaataaataaataaataaataaatctggcttgagttttgacaaatgtatatgcagggtcaatgggaagacagacgctggagggtggaagcctgactgtgagagtgagccccctgctttcctgaacagtcagtggaggaggtcctgggagctcaggtgagcacctgaacggtagggcagagcctgagggtcttggtggagacaggcaagaaggttgcaggaacctagtctggcccagtgcctgggagaacgggagggaacacggaggcagggaggcagaggggttggcaggacctggactggactgtgcgtcgcagctacccacagcttgaccccactgccttgaagtgagtgatgcaccctcactagtgttcagcgtccaatttcatcctggccctgagtgtgtaacggctttgcccttgcggggccccctgggatgaggggtgagccctgtcccttcctggtcactgtctgccatcaggagctgccccgcttacagctgtgattcaggagccactgcatttcctccagccccctgggtgctgccagggggtcctcctattctgggagctggtgtgttctgactggaggctgccatgtgcagagtgctgtcaaggagaaggggtgtccactgcccagccctgaggcccaaggccttggccagccttgctgccagcgctgcagggaaaaagcctcctttgtgtgtgggaagtttaataaactccgctcagattgtgtctcgcagcgagtgtctggaaccttccagacaagcctcaggcgtccggtcctccagttggtgtggaaagcgtgggcgatcaccaaggggggtgggttggggcagatggagccggcgtgagtcccgtctcttcccttccttcccagaaaggcagccctggagtccatgccttgtcccgctctcaccggcaaaaagtataatcttattagaaataggaaagttccaaaaagcatcaatgagttaaaaagagggctgggcatgttcggtcatgcctgtaatcccagcactttgggaggccaaggcgggtggatcacccgaggttgggagttagcctgaccaacatggtgaaaccctgtctctactaaaaatacaaaattagctgagtgtggtggcgcacgcctgtaatcccagctactctggaggctgaggcaggagaatcacttgaacccgggaagcagaggttgcggtgagccaagaccatgccattgcactccagcctgggtaacaagagtgaaactccgtctcgaaaaaaaaaagggctggggccgggcgtggtggctcacgcctgtaatcccagcactttgggaggccgaggcggtttgatcacaaggtcagaagtttgagaccagcgtggccaacatggtgaaaccctctctctactaaaaatagaaaaactagccaggtgtggtggcacatgccaataatcccagctacttcatctgaggtcaggagttcaagaccagcctggccaatatggcgaaactccgtctctactacaaatacaaaaattagccaggcgtggtggcgcgcgcctgtagtccagctactggggaagctgaagcaaggagaatcgcttgaacctgggaggcggaggttgcggtgagccgagatcgcatcattgcattccaggctgggcaagcctaggagagaagagcgaaattgtgtctcaaaaaaacaattaattaaaataaaatcagtgccataggctgtttctggtaggcagtgggttcctagggtggagcagggaagggctggaaagggtcgcctgtgcccagcccgactccccgtgcttctcgggggacagcacggctagctgctgctgcggagcccacagtggggttctgggggggggggtgcaggcagaaggccgccatgcctccctccccctttccaccccagtgagagtgggctcgaaggcagggagtctgcccgccttgtggagcctccgcagaggcacccagggctgccgtgagcgcacagcctggcggtgtcccacggccctgccctttcctgtcacttccacctgttgcaaaacactgtgctttcgtatcttttctttctacctgtttggaaatgtgaaaatcactgctgccgtaggaaacgggcccagatccgggctgtggctctcccatccgcaccgcccccgcggtgtccagccaggaggtgggaggtgggcggcactcagtgtgcctggttgcggcgatgattggcagatgcttggacctatggtaaagaggattttcgcgagctgggagtcagtcctggactttgtaggtctttacatcccaggcggcctttatggggttccagcatctgctgaggcccctgcgccagccatgtgaggcctgggtgtcctcgaggcctctgtttgtgcccctctctgggcagcgggagggagagctctgagacccagagggagctcaggggctgggcagccgcagaacagcgggggtaatgggtccactgggggttctgggctgtgcacacagtgggcttccggtgcccagccagctggggcaggcctggaatgttggttcctctctcaggatctggggcgctgctgtagctgtcggggaatcagtgaggcggctggacggcccgtatatcccacaaacgccaccgtattgctcaaactggactcaattttcttaacacctttttttttttttttttttttttttttggagacagggtctcactgtatcgccgaggctggagtgcagtggcgcaatcatagctctgggctcaggtgaccctcctgcccccaaggtagctgggactgcagatgtgcaccaccacacccgactagttttttgtagagatggggtttcgccatgttgtccaggctggtctcaaactcctagactcaagctatccgcctgcctgggcctcccagagtgctgggattacaggtatgagccactgcttcgccacgttcacctttatttacttatttatttatttttgagacggagtctcgctctgtcccccaggctggagtgctgtggcacgatcttggctcactgcaagctccgcttcagcctcccaagtaagctggaactacaggtgcctgccaccaagcctggctaattttgtttttgtatttttagtagagacggggtttcaccgtgttagccagtatggtctcgatctcctgaccttgtgatccgcccgcctcggcctcccaaagtcctgggattacaggcttgagtcactgtgcccggcccacctttttattttttattttatagagacaagggcttgctgtgttgcccaggctggtcttgaacccctgaccttaagtaatcctctctggcctcccaaagtgctgggattacaggtgtaagccatagtactgggcctaaagttcaccttttttttttttttttttttttttgagatggagtctcgctctgtcacccaggctggagtgcagtggcgtgatcttggctcactgcaagctctgcctcccgggttcacaccattctcctgcctcagcctcccgaatagctgggactacaggcgcctgccaccatgcccggctaatttttttgtatttttagtagagatggggtttcactgtgttagccaggatggtctcgatctcctgacctcgtgatctgcctgcctcggcctcccaaagtgctggggttacaggtgtgagccaccgcacccggcaaagttcacctttttaaagtgtgtaattcagtggcatatagtacattgacagagttgcacaactatcacctctatcagcttccagaacattcttgttaccccagaaggaaaccccgtctctgtcagccatcactccccattccctccccagtcccggcacccacgcattcccttcctgcctctggattggcctgtcctgaacatttcacacgagtggtgtcacacaccgcgtggccttttgcgtccggcttgtctcacggagtgtgctgtcctcaaggggcatccgcgccgtggcctgggtccgaacctctctgctgttcacggctgcgtcactttccagtgtgtggagggccacgctgcgtttgactgctcatctgtggctggacacttgggctgctcccgcctctgcctgtgaattgtggctgctttggtgcacgtgtgctcagccggcgtccctctagaatccttgagggccttgtttcagccacatcaggagggattcagggaccagggcacgcgggtctggagctgggtgttcctgggtctccatgtgcctcccagtcctgctctgagccgtgggaggccggggcgagggccaggcccatctcttccctgtatgatctgtttctaggcagacggaggctcctagccccacctctctgtgagcttgagtggcgtttatgactctccttcctatttcctgtcctgctaatcaacaagtcagctaaacagtccatgctgcctgggcaagcccagtaggcccctaacgtggcacctcggagcggctggcgatgccccaagagccgggcttccccctcctggaggctcttcctgttcctcgccaagctcttaggtttcgctgggcctcctcttctgctctttttctggctggagacgtcagaggaagcctggcgatctagagaagctgatgtgcacccatcatcccggaggtgactgccaccaggcgggggtggctccacccccactcctcccctggcataaatcgggggacgcacgtgcctgcgcagaatgccttggtcccttttaattaaacagacaacccagtgtcccttggtctatgctgacctgctcaggagtgcctgggctcttccacgtttcagctgctgtgtgtcctgctgctgtgaagtgtccccgttgaggtggaggcagggcagggcgccttcggtgagggcgagtcctcctgtgcccgtttccccatctgtagaatgatggctcatggaggagacatggtgtcggcaggtggtggccggcgcagggaggtttccaggagggagtcctccaccctcatttgcttttagggccgtgcagcctcccgagcggcccccacgaggctctgaggctgcatgcaggttgagctcctggcctcactgcccctcctcagggttaggactgtgctggagcctgggtgggtgtggggtggtccctgcacaggcagcaggaggtgggccagagcggtgctggacctgaaggcccgtggctccctcagctccactgaggaggctggaatagtgtcctgggccaccttccctgccggtagccggctcctgctgagggagggggtgctttcgcctcctggtggagcatcaggctcttggggcctgtgcgtccgagcatctggcctctgctgtctgaaaacagcaccttccccgccccccggccaccgcatctcctctgaatagaaggcaagtcttgcctcccaggaatggcctgtgaccttcatcagcgggggaggttaggggcacacagagccctggggaacaaggggatctggggctgagccgggcctctcgggcccaccccgagctctcctgagcagcctggcaggcaggaaggcgctgggccccggggcctttgccgagcccagcctcaccctcagcgtccccctcaatgccctgggtgcctgccaggctgtggacacaggccctggccagttctataaataaccttgccgggccctgctgggaattggtgccaccaccacatagcccagagagaacggaaacacagggcttctcagcgagcagaccaggcctgcggtgaccagtggaagtgggggacgctttcagggctgggcagcccgacagggcaccgggcacagccaggggccggaaccagttgctcactggctccgcttctgggggactgtgtccctctgtgccccgtccccatcacaccttgctttcccttcatcctgctctcctagcccctccccagactggcggccccttgtccaggcccagccccagcacagcctgcagccctggcagagctcaggccttggccttctgaggttgccctgagggcagtgagcaatgagccctgggactggtgcactgggagggaaaggtgagccaaggcttcctgcaagaggcagccctgagctgggggtggggaaggctgggtcgtgggatacccctgacaccccaagttttttttttgagatggagtcttgctctgtcacccaggctggagtgcagtggtgagatctcgactctctgcaacctccgcctcccaggttcaagcgattctcctgcctcagcctcctgagtagctgggattacaggcgcccatcaccacgcccggctaatttttgtatttttagtagagacaaggtttcaccatgttggccaggctggtttcgaactcctgacctcaggtgatccacctcggcctcccatagtgtcgggattacaggcgtgagtcaccgcgcctggccccccagctgttttttatgctccatgcttgggcttcctgttaagaattaaaaaagaaaaaaaaaactatggagatggaatttacatactgtacaactcattcgttcacagtgtacaattcagtggcattaagtacattcacacggctgtgcaaccactacttctaattccagaacgttcggtcaccccaaaagcaagccccattcccattgtgtcactctccatcccctccaccagctcctggccactctgaatccacttcctggctctggattggcttgtcctggatattgcatagaaatgggatcctgtcggccgggcgcggtgactcacgagagcaagagatccagaccatcctggccaacatggtgaaaccccatctctactaaaaatacaaaaattagctgggcgtggttgcgggcacctgtagtcccagcgactcaggggctgagtcaggagaaatcgcttgaacccgggaggcagaggttgcagtgagctgagatcatgccattgcactctggcctggcgacagagtgagactccgtctccaaaaaaaaaaaaacaagaaatgggatcctgtcatcccagcgttttccgaggccgaggtgggcagatgacttgagcctagtagttcaaacgagaccagcctgggcagcacggtgaaactgtctctactaaaatacaaaaattagctgggcatggtagcacacgtctgtagtcccagctacttgcggggctgagatgggaggatcgcttgagcctgggaggtgcactccagcctgggcgacagggaaaccctgtctcaaaaaaaaaaaaaaaagtgcatcacacactgtgtgtcctttagtgtctcactgtgacatcctcaaggtgcagctaggctgtggctcgagtcagagcctcactggtttttgtggctgagtcttgttgagtgcgtggatgggctgtgctgatcctcgtctgtggaagggcccctgggtggttccacatctcggctgctgtgcgtcctgctgctgtgagcatctcgtgctccgtttctgcgtggcgtgtactgttcctcagggtgtgtacctgggagtggagctgctggctcacagggtaacagacctttggagaagctgcagacgcttccacgcccacccactgggtgtgaggaccttgctcctcgtcatttttgtttttgtttaattttttcttttatgagacagggtcttattctgttgtccaggctggagtgcagtagcacgatcacaggtaactacaggctcaagtgatcctcccacctgagcctcccgagtagctaggacttgaggcacgtacctccacacctggctaatttttgtatttttagtagagacagggtttcgccgtgttgctcaggctggtctcgaactcctgagctcaggtgatccacccgcctcggcctcctatagtgctgggagaaatgaagtgtctgcgacagggcggcagctgcagagggggctgtgctctctggcctgttgtgccccacccttgtgacaggcaggtgggcgtggccaactgggcggcagctgcagagggggcagtgacaggcgggtgggtgtggcaggaccccacaatgtctctttctgtggcgtctccttcttcgcctgccccttcctatgggccatccttccagctcacctgcggcccaccctccaaggagtgggaccctcggagttgggagcccttggctgcgtgggactgtactgtgtgacggagccatcaccagggctccaactcaccctggctcctgccacagtctgggctccatctgtgctaccattgcagtagtctggtttctaggaagcaaaactgttactgagttacaaagctcaattaagagtgtcctttgggaggccgaggcgggcggatcacaaggtcaggagatcgagaccatcctggccaacatggtgaaaccctgtctgtactaaaatacaaaaaaattagccggctgtggtgacacgtgcctgtagtcccagctactcgggaggctgaggcagggaaatcacttgaacctgggaggcagaggttgcagtgagctgagatcgggccaccgtgctccagcctagggacagagcaagactctgtctcagaaaaaaaaaaaagtgtcctaactgtgtcctccaaagccctcgccggccgatgacagactagagggcgctgtgctcccaccccctaccgccctgagcctggacgcgtggcccctgcagggccctttcccacagcactgtgaactcacagcttctctctagggaagggaggaggtacgccacttccacagggagatggggaggccgactccagggatccaggccatcatcctgacgttgggtcggctgatacacccctgtcctctctgtcccagg

SEQ ID NO: 30 - DNA, 11029 bp, Homo Sapiens
cagagtgtgtgtgtgatgaacaagtgcttgtgtgatgatgccccatttgtgcaattctccagtcatggaagggtacagtttcatgatgtctccagtgaaatcctggtttatgaggacttctacatacacattctgtcatggggattgcattgcctaaatatgtgagagcaaggctttggttatgtgttaacaaaacagctaagctccctatggaagaaaaatggaagcctcttgaaaggacctacactcctgcctgagtctgtggaagaggggcttgcagttggcaatgtgtatacatatgtgtatttgttaccttgtggaaatcataaccggttaaggggtgcaagattgatttatgcaggagagctgtagtactatggagtagaatgtggtcatgaaacctggacttcagccctttgcctaccatcaaccagtgttggccagggtgcttcttcaactgttagtgaagggattggactagataactctgaagataccttttttgagaattaagtaacttgctttaaggctgggtgcggtggctcacgcctgtaatcccagcattttgggagggcgaggcaggcagactacttgacgtcaggagttcaagaccagcctggccaacatggtgaaaccccatctctactaaaaatacaaaaattgatggccgtgcacggtggctcacgcctgtaatcccagcactttgggaggccgagacaggtgaatcatgaggttaggagctcgagaccagcctggccagtatggtgaaaccccgtctctactgaaaatacaaaaaataagctaggcatagtggtgggcgcctgcaatcccagctactcaggaggctgaggcaggagaatcttttgaacctaggaggcagaggttgcagtgagccaagatcgtgccatggcactccagcctgggcgacagagtgagactctctctcaaaaaagtaaaataaaaatacaaaaattagccaggtgtggtggcacgcgcctgtagtcccagctgcaggctgaggcagaagaatgacttgaacctgggaggcggaggttgcagtgagccgggattgcaccactgcactccagcctgggccacagagcgagattctgtctggaaaaaaaaaaaaaaaaaaaaaaaaaaaaaaaaaaaacctttcttttaacccccaaaaaatttttaaaatttggaccaaggtccccaatcctggaaacctcggggattttggccaaaaagaccttttaaggaattggggcggggaaaaaaaagcccccttaatttagggccaaaataccctgtgggggccccaaagtggggtcccaaataggtggggaaaacccatggattgttcccctttggcccaattttccaattttttttagccccccggaattttacgggtttttccccccaattttaacaattttttaaaagggccctatgggcctaaatttcttccccgtttttggacttgaatccaccccttttaggggaacccctcaccctcctttttcccaaaacccttttggggggggtataatcccctttgtatggtaaaccggccccggggtccagtttccggaaagcttgccttttggaattaggcccgttttcggggtttctatgggggacttttaaacctggccccttgtaaacctgggggttaaggggtaaagtctctttggctttgaatccccaccattttagggccgagcgggcaggcacagtggctcacacttgtaatcccagcactttgtggaggccaaagtgggaggattgcttaacttcaggagtttcagaccagtctgggcaacatagtaaaatgtcatctctatgaaaaatttaaaaaattaggccaggtgtggtggctcacacctgtaatcccagcaatttgggaggccaaggtgggtagatcacctgaggtcagaagttcgagacttagcctggccagtatggtgaaaacccgtctctactaacaatacaaaaattagccaggtatggtggtgggtgcctgtaattctagctatttgggaagctgaggcaggagaatcgcttgaacctgggaggtggaggttgcagtgagccgagatcgtgccattgcactccagcctgggtgacgagtgaaactctggtgtttttttattttaattttttttttgtattcccagcttctcaggaggcaaaggtgggagaattgcttgagctcaggagtttgaggctgcagtaagctatgattgcaccactgccctccaggctgggagaaagcaaaacactgtctccaaaaataaaaattaggctgggcacggtggttcacgcctgtaatcccaacacttagggaggccaaggtgggcggattacgaggtcaggagtttgaaaccaacctggccaacatggtgaaaccccgtctctactaaaaatacaaatattagctgggcaaaatgggggggccccccaattccaggttttcagggggtttaggccaaaaaatttttttaaccttggagcccaaggttccccttggccaaatttgggccaagggcttccagcctgggggcaaaaagggaactttttttcaaaaaaggtaaattaaaatcccaaaattaccccgggttggtggccccgccccttagtcccaactgcaggtttaggccaaaaaatgacttgaacctgggaagccaaggttccaataaaccgggattgcccccctgcactcaaacctgggccccaaaagggaatttgttttggaaaaaaaaaaaaaaaaaaaaaaaaaaaaccttgctttaagcaccgaaaaagttgtgaaagttgtgaccaagctcccacatcctgagaactctgggactgctggccaatagtacttgttatgtagttgggctgggataaataaagcccacttaatttagtgctagatatcctgtgtgggcacctaagatggtgtctcaatatgttgtgtaataccaatgaatgtatcacatatgaccaaatatgccaatgtttcttagctccctgaatatttactgctttttcctcccactctcaccaactcttgaaaaggccctaatggccctaacttcatcaccagtattagaactagaatctactctttttatggatacactcacactcacttattccaacaaccctatgagggaggtagtagtctcattgtatagtaaaacaggcacagagatcaagttaccgaaaagcatgacttttgtaattagagcagtttcccggattctattgctgtatcttactacctgcacactagtaaacctggggtttacaggctacagatcctttcagctctgatacccccaccactctacagcccctgaaccccctcctccagcctgctcttactgtccagataatgtttcaaatacatccctgcatccatctcgaagcaaaacaaagcaacttccaatccgccccgggttggaagttcctcttctccacatatttggtagaaattatatagctgaaagtctgtctctttaaaaacttgccgtaagacattggtaattcttatgaaggatgtgtgagggtacgaaaagtgtgaggggtggcagctatctctaagatactatcttactaacaccactattaggttatggcctttgtgttggcagtgtgttgacagcctagtgtgttggcagcctctcatacccttgactgcttcccattctgatgaaaaccatagaaatcactctaccatagctgactagagtgatggctagcaactaactagccaactagcccagtagtgatactgctgcatccctcaatcccttcagaattatgatgctaacatcacatataaacaaaaggaaaacaaaaacacgagatttcccccttagagagtagcaagaggggccaggcacagtggttcgcacctgtaatcccagcactttgagaggctgaggtgggcagatcacctgaggtcggaagttcgagaccagcctcaccgacatggagaaaccccatctctactaaaaatacaaaattagtctggcgtgatggtgcatacctgtaatcccagctacacgggaggctgagacagaagaatcacttgaacccgggaggtggaggttgcggtgagccatgatcacgccattgcactccagcctgggcaataagagtgaaaattctgtctcaaaaaaaaaaaaaaaaaaagcaagagggcaaggcaggaagtaatattttatatgtgaaagtgtattctagtgtaacgtacaggagctctgacaaaagatgtgcagaattatagttttattatgagtcattctttgtatttataagtagaaagttgatcatctttctcaagttaaaaaaataatgctgggggagatggtgtttgtgtgagtgaatagaaattcagacggtttaaatgtctcaaggcctgatactcttccccaacttccttaagaaactaactggcttgaaaaaagtcattctgcaaaagagggaaaaaaagttggatcttccagttgctgagaaggtatgtttacgcaatatgagcctaaagtgaacagttacccctgcacggattaccatacattcccgttttggagggaaaaaagtttgctagagaatgcaaaatggcgacctccagtgacgtcatacctgtctcggtcgcgtcctggggtgtctgtaagggcggaagcgggctacagccgcctcactgtgggcggtcgtggctaccatgcaaaaggaaaagtttcagtgtcgggcggatgtgtaccggcggtaatatagtaagggcggaagttctcctttaagggcggaagttctccttttaagggcggaagttctccttttaagggcggaaaggctttagccgcaaaatggcttcggcccctgtcgcgttacagtcacttccggggcggatcggaagttgctttgttttgcttcgagatggctgcggggatgtatttggaacattatctggacagtaagagcaggctggaggtgggggtcggggctgcagagtggtgcggggatcagggatgagaggatctgtagcccttaagttccagtgacgagaaggtcacaattatgaagcggttctgtggcaggaaatattggagggtgcggagaaagagggggcggggcagcaggatcgaggccccgctgatgggtgtagacgagggaggggtgcggtgtgggggttagagacgtgtcttgaagggctagtgtgcatggccaggaagatagttgctgcccccattctccagggtctccagcctcggtagatttttttccccatagtcgttcagaatcgttatcacacactgccatttggagcagcggtaaagacctctcctccactccattcttcctcaaaagtggcttctcatggggttgagagtggtggtgatgagtgaccactgtcagatgatgaactagaacgcttctcttcatggagtaaagatctaattcccatcaaatgaaaatctggtgtttatgcgatttatgtaaaccacccctgcagaaagcctattgctctgtgcgcttacatttgttttagggcccggagtcatttattcaacaaatatttattgaggtcctgctatgggtcagacataatggcaggcactagggatagaaaaatgagtaagacaaggctcctgccctcaagaagctcacgatctagtaggaaacagattctgcaaataattataaaacactgtgacaagtgagataatggaaatacattaaaaaggacacttggtaggcaaccctggagaaaaggggggtaattacctggggatgtaggaaaagctttacagcggaggtgatgtttgaatagggtcttgaaggttatttgccagtgaggagagaaaaaaggaattccaggttggggaaagcatccgcaaaggtactgtgatgggtttgtggcaaggtcaagggtgtttgatatttatgactcagaggtcagcgtatttgatatttatgaatctaaggtaagaaattgagaaaggagactggagaaagaggctgaggctagattggacaaggtcttttaagccaaacgaagaagtttgcattttaaagtagagtatgatttttatagaggaaaatgactaatatatggtaaattggagcatgatattgttgataacagagatcaattagtgataacattccaggacagagataagaacctgattttagggagttacagaagtatttaggagttaaatatgaaaggactgactgaatgactgagtggttgagagagaaggaagaatctaaggtggcttcttcctgcttagaaagtgaggtagacaggctgggcacagtagctcatgcctgtaatctcagcactttgggaggccaaggcgggcagatcacttgaggtcaggagtttgagatcaccctgtccaacatggtgaagcccagtctctactttaaaaaaaaaaaaaaattagctgggcatggtggcatgtgactgtaatcccagctacttgggaggctgagtcaggagaatcacttgaacccagcaggtgaagattgcagtgagctaagatcatacataccactgcactccagcctgggtgacagagaaagactccgtgtccctctcaaaaaaaaaaaaaaaaaaaaaaaaaacaaaggctggtggccaggcacggtggctcatgcctgtaatcccaacactttgggaggctgaggcaggcggatcatgaggtcaggagatcgagaccagcctggctaacatggtgaaaccccgtctctactaaaaataaaaaaaatagccaggtgtggtggtgtgcccctgtagtcccagctacttaggaggctaaggcaggagaatcgcttgaacctgggaggtggaggttgcagtgggccgagatcatgccactgcactccagcctgggcaacagagtgagactccgcctcaaaaaaaaaaacaaaaacaaaaaggctgggagcggtgctcacgcctataatcctagcacattgggaggctgagatgggtggatcgccttaggtcaggagttccaagaccagcctggctaacatagtgaaaccccgtctctactaaaaatacaaaaattagctgggcgtggtggcagacgcctgtaatcccagctacttgggaggctgaggcacaagaattccttgaacctgagattgcgccattgcactccagcctgggcgacaagagcgacactacacctcaaaagaaaagaaaagaaagttactcagcggagaaaagatcatgccaactgctgcagagatattttttaggataggcttaataacaccattagatttggtaaatcaccagtgactcagtcttgtgaactggtggtagcagacctgaagttgtaggtttaaacagtagaggcattttatttttttttatttattttattttagtttttctgtttgtttgtttgtttttgagacagagtctcactctgtcacccaggctggagcgcaatggtgcaatcttggcccactgcaacctctgcctcccgggttcaagtgattctcctgcctcagcctcttgagtagctaggattacagtgcccgccaccatacccagctaatttttgtatttttagtagagatgaggtttcactgtgttggccaggctggtctcaaactcccaacctcaggtgatccacccaccttggcctcccagagtgctgggattacaggcatgagccaccgtaccaggccttttattttttatatatatatttaatttttatagagacaggatctggccatattgcccaggctggtctcagactcctgagatcaagcgatctacctgccttggcctcccagaatgctgggattacaggcgtgagccactgtgcccagcaagtagaggcatttttaaagttttaggtggagccttggcaagagatttctcttgtactggggtgacaaatattcatgcatttattcaagtatttactgagtacctgctctttgcaagtcataattctaaacactatggaaacaggagagaatatgatagccatgttcggcctggggagacagataccaaataactaattacacattattttttttaatttttttgttttttgaaacagtcttgctcttttgcccgggctgcaacctctacctccctggttcaagcaattgtcctgcctcagtctcttgagtaactggaactacagccacaggccaccatgcccatctattttttttttttttttttttgagacagagtctcgctctgtcgcccaggctggagtgcagtggagcgatctcggctcactgaaagctccacctcctggatgcacgccactctcctgcctcagcctcccgagtagctgggactacaggcacccgccaccacggccagctaatttttttgtatttttagtagagacggggtttcaccatgttagccaggatggtctcaatctcctgacctcgtaatctgctctcctcggccacccaaagtgccgggattacaggtgtgagccaccgcgcctggcctaatttttgttttgttttgtttttgagatggagtcgcactctgtcacccaggctgaagtgcagtggtgcgatctcagctcactgcaacctccacctcccggatttaagcaattcttgtgcctcagcctcccaagtatctgggattacaggtttcaccatgttggccaggctggtcttgaactcctggcttcaagtgagccacccgcctcggcctcccaaagtgctagaattacaggcgtgagccaccgtgcctggccctaatttttgtatttttagtagagatggggttttgccaggctgccaaggctggtcttgaactcctggccttgagtgatccacctgccttccagaatgctggattacaggcatgggccaccgcacccagccaactaattacacatttatttaattacagttggataagtgctttaaaaaggtggctagaataccttgacatagatcgagggcagttaacagagtctgggaaagttgagtttgagctgaactttggaagaacgaacaggaatttaataggccaagagggatggggtggatgggatgaggaaaaacgagcggtgcattccaactagagagaacagcatgtggaaagccaaatggcaggaggagcacaggccagtttgaggcagtgcgaggaggccagtatgggcaaagcagagcacaaagggagactgacatgagttcaggctggtgtgaggtaagcaagggccagaaagcgcagaacatcttcagagcagtaggaagtgaccagaaggttataagcgggagagtgacttgattaggtttgcattttttatttttgtgtttgtttttgtttttgtttttttgagtcagtgtcttgctctgtcatccaggctggagtgcattggcgtgatctcggctcactgaaatgtccacctcccaggttcaagggatttttgtgccccagcctcccaagtagctgggattacaggcatgtgcaccaagcctggctaagtttttgtatttttggtagagacagagtttcaccatgttgcccaggctggtcttgaactcctcagctcagctgatgcgcccacctgggcctcccaaagtgctgggattacaggcatgagccaccgtgcctggccaggtttgcattttttaaaaaggacattctggctactatatggaagtagattggaagtgttatgtgtataatagaggataccaggagactatttgtaatttgaggacaaagagcttggaggcagagatggaaaataaaagaaaggggcccgtcttagtggctcatgccagtaatcccagcactttgggatatcaaggcgggcggatcacctgaggccaggtgatgaacgtaggagtatgttcatcaaggtaaagaaagggaagagcttttttttttttttttggagacagagtctcgctctgtcaccaggctggagtgcagtagtgcagtcttggctcactgcaacctctgcctcccaggttcaagtgattctcctgcctcagcctcctgaatagctgggattacaggtacgtgccaccacacctggctaatttttatatttttagtagaaacaggctttcaccatgttggccaggctggtctcgaactcctgacctcgtgatccacccgcctcaacctcccaaagtgctgggattacaggcttgagccaccacacctgacgggaagagcttatttataaaggaaggtcactgaaggcgaaaagggtgggatagccatgcagaaatggaaaggttttgtagagaaagagttaagcatggcctgtcatgagagaactgatccatcctgtcacagataaatccagaggttcagaggaaggaaaactgagctgcactttattttttgtttgtttgtttgtttgtttgagatggagtctcactgtgtcgcccaggctggagtgcagtggtgcgatctcggctcactgcaaactccgcctcccaggttcatgccattctcctgcctcagcctcctgagtagctgggagtacaggcgcccgccatcgcacctggctaattttttgtatttttagtagagacggggtttcaccatgttagccaggatggtctcaatctcctgacctcgtgatctgctctcctcggcctcccaaagtgctgggattacaggtgtgagccaccatgcctggccatttgtttgtttttgagacagggacttgctctattgcccaggctggagtgcagtggctcaatcacggctcactgcaacctctgcctcctggattcaagtgattctcatgcctcagcctcccaagtagctgggattagagatgcccaccgtcacactaggctaattttcatatttttaatagagatggaggtctcgccatgttggccaggctggtcttgaactcctggccttgagtgatccacccccttggcctcccaaagtgctgggattgcaggcgtgagccaccatgtccggcctgaactgcactttaaaaggagctgtaaggcctatgcatagtcagtcctgtgattgtttctctctcttccc

SEQ ID NO: 31 - DNA, 1157 bp, Homo Sapiens
ggatcctgctccctctgaaggctccagggaagagtgtcctctgctccctccgaaggctccagggaagggtctgtcctcttaggcttctggtggcttgcaggtgcagccctccaatcctcctccccaagcggcctgctgcctataaggacacgagtcatactggatgaggggcccactaattgatggcttctgtaaagtccccatctccaaataaggtcacattgtgaggtactgggagttaggactccaacatagcttctctggtggacacaattcaactcctaataacgtccacacaaccccaagcagggcctggcaccctgtgtgctctctggagagcggctgagtcaggctctggcagtgtctaggccatcggtgactgcagcccctggacggcatcgcccaccacaggccctggaggctgcccccacggccccctgacagggtctctgctggtctgggggtccctgactaggggagcggccccaggaggggagagactcgcgctccgggctcagcgtagccgccccgagcaggaccgggattctcactaagcgggcgccgtcctacgacccccgcgcgctttcaggaccactcgggcacgtggcaggtcgcttgcacgcccgcggactatccctgtgacaggaaaaggtacgggccatttggcaaactaaggcacagagcctcaggcggaagctgggaaggcgccgcccggcttgtaccggccgaagggccatccgggtcaggcgcacagggcagcggcgctgccggaggaccagggccggcgtgccggcgtccagcgaggatgcgcagactgcctcaggcccggcgccgccgcactgggcatgcgccgacccggtcgggcgggaacaccccgccccgcccgggctccgccccagctccgcccccgcgcgccccggccccgcccccgcgcgctctcttgcttttctcaggtcctcggctccgccccgctctagaccccgccccacgccgccatccccgtgcccctcggccccgcccccgcgccccggatatgctgggacagcccgcgcccctagaacgctttgcgtcccgacgcccgcaggtcctcgcggtgcgcaccgtttgcgacttggtgagtgtctgggtcgcctcgctcccggaagagtgcggagctc

SEQ ID NO: 32 - DNA, 8093 bp, Homo Sapiens
ccatggaaggaaatgagatcagctagcgagctgacacagaacaaggcagtctaaaacaaatttttttaaaaatacgaagaacagatattgaagggaagaggtgcctgcaaagactaagaaagcacacctggagatggtatctcctcaaagctaaagtcatcaagtgttcaagtgtttcaaggagggtaagactattaacaaggacttagcatagtagagcaatttgagtggcaatacgggacactgggaatacaaatctgtcaagaaaactagtaggaatgagctataggacagtaactggtaaggacctaataattttttttttaatgtacgtattttaactatattcactgctacaacaggaccagtaacaactatatttatttaaaaaaaaaaagactgccatgcagttacagaattacttaatacagaaaacagtaaaatacacttttttctttttctttttttttttttttttttacaaacaagactagcttatagcaaattctctatagctaagggtcaatttaaaatccttggcttatatctccccctcactcaatgactacatgatgcaaactaattttattaacaccttaagcaaaacatactggaatttcacaaaatgtacaagatttcaatatttaaggaactggggttagaaagcagaagtggctttcaggtcttccagtctttctctcaagtaataaagctctgctgtgaatattcaaagctattgggaaattaccggtagatttttctgtttttttttttcggttttccactatgttgtttctctagatatgtaagcttactctattaaccaaaatctcagcttgaccattcttgataagtacctaatcgacatgtaactttttttctgccttaaatatgtataacaggacagagcccttaaatctgattcaattattaattcctgatttacaagtgctatggtgagctaacagaacttatcaatgcctttattgcactttactagccaaatttagaaggttggaattagtctctcctatctagtattctgtcagtttgcccagcttgtacttttaattttgcttctaatggtaatctgccctatcccttgaaataaaataatctacattttgggagggctaattcttcattgtgccaggctgtcccatgcactgcaggggtgagtgtctttaggcttaaatgccaacagaagcccctagtaaatatgacaaccaaaaaagtgcccctacacatttctcagcatcctctggaatgacaggttactgcctctagttgaaagccactggcacaactttggtttttaagctcttatgccatttattttaattgcccagacatcaattccacctaaattcttagtcatagcctggttccttgaatttgctggattagtaaccacagattaaggtgtttcaatagttaagacaggactttggaacaagagtttttaaattgtataatacttgagaggatctatgaatataaattgggtcctgtttataattagttttacataatgaactttaagattgccttttcatggtgaacagaagtttggaaattactgttttggcacaaagcagattatcttagtagaaatacagaattactgcaatctgtgaataagactgcttttaaatatttctacttgtgtgctatcttacatatagaatgtgtacgacagttccaaattttagaataaatccatttctagcatctaacaaaatctgatactgtatcattttaaaacaaagtgtttactttaggcaggattttttaaaataaagcagcaatacccacgcagataagacaaaaaagctaaaatatctcacacctcctaatcctggagtgcaatcttttttcctcatcgtttttgatagggccaaacttgtgtctacagtaaaaaaaaaaaaaaaaagaattactaactggcaaccattaagattctatacttaccatagtcctttaataggcaagctgataaaatagcccccagttattaaaaaaaaaatccaaggaaaacccccaataattagtcttatctccaaattgcatgaagtctcctatatctgaaacttaaaaatgattctaatgacttcctctatcagtaatgtgttatcactgaggtgggtgatggggagggaagagggaagaaatctgtcagtattaccttcgaactcagaaatgtttaaaaaaaagtctcaaacattttgatggttagacaaaacacctccactgttatgtatgggcttcctttttggaaacttatgaacttgctatgtgagcttctgcaaattggttcaaaagcacatttaaggagttgataatttaagactatatgaatcagaattttaacactccattaaaataagagctgaaatttttggcatttatcttcagaacacctaaaaaacagactgcaaattcaactcacattaatactaaatctctttaaaattaactatatcataaaagacaatgactttgtcactaaactaagttttaaaaaaggtggcattctcatgtttcagtcccatgctgccatttgagatgaaaaaaaaggcaactgtcagaattttaattgtgatcagtttggacggctggtacttggtactttctcacaatccaaattagtaaacttgaaaactcaaaccaatttttgcttttagaattaaattcttgttgagtttttcaatcttgtactacaaagccttatggattagattcatttctttctctcacaaggtcatcccaaccgggctccatttcagttgtggcaacccgaaacagggcttggagatgctcatctgttaatggctgactcaaagtgtgttggtttcgagtcaaatatgaaaaagccttttcacagatttggttactatcaaacaaggatgccaccttacaggcaacccctttgataattgggtaggattcagcagacaatccagcataaaactgccccaagtctttgattctgtattcattccaaagattagtgtttgcctgaagttttgttagctccaccctcactgaaataggtgcatattcaggtttaaagttaaatggatttgaaaaaagttctaagtcctttttaatgaacctgaggtccttaaaatgtctctcaaattctttttggagacgacagatcaccatttgatacctatcaggatcaaatattttttcatcttccttattttgctgttttagctcatcaacaacttctctgagggcaggaaagtctgttagatttttttcctcaatatgtctttgaaataaattcagcttaacttcgaaagtacaaatatggtcaaaggcagcagcagcaaagactttactaactcgtaattcttcactgagttctcgaaggtgttccataatgtccaccaagaagccaaagtcacaaagccattgtttgtctgagaagtggactgttgttgcccctactgaaaccaagaacgcttccatttcttttcttagagagaatattagttttaaagttttccctctcctaagccaattgttcagacatcgtccattaaccctttcaccatgctctgattcagattccgttagtaaagtctgaaattcaggtcgcctaacgcctctggtcttaatcaaaactatccattcggatatggtatttatgatctgattaacatctacatcataggagctcaacagttccaagtgaagaaatcctgaataatgaatgacattccaacagttggggcttacggccttttctctcatgtatgagacgagtcctgagttctcaccaatcatcctcaaagtatgggtcgtggtcagtccaaccattctctgcaagctaagccctgctgtctgcagggactctaggattgccgacatgagcgcaccaacactgaaatgatgagtcaggttgattatggtcagaagatcttcttgcacctccaactcagggcctacaccgcggataaagaccaggaggtagttctcataggccacaaaagcctggtcgtccaaggcaagagaataggctttaaagtccctggctcggttaaaaagctggttgcgtagattcctgtcaatgctcaggatcctctgccttgtgatatctggagataagtcaacgccttgcaggacgcttacatgctcgggcagtacctctctcagcaacacctccatgcactggtatacaaagtccccctcaccccagccgcgacccttcaaggccaagaggcggcagagcccgaggcctgcacgagcagctctctcttcaggagtgaaggaggccacgggcaagtcgccctgacgcagacgctccaccagggccgcgcgctcgccgtccgccacataccgctcgtagtattcgtgctcagcctcgtagtggcgcctgacgtcgcgttcgcgggtagctacgatgaggcggcgacagaccaggcacagggccccatcgccctccggaggctccaccaccaaataacgctgggtccactcgggccggaaaactagagcctcgtcgacttccatcttgcttcttttgggcgtcatccacattctgcgggaggccacaagagcagggccaacgttagaaaggccgcaaggggagaggaggagcctgagaagcgccaagcacctcctccgctctgcgccagatcacctcagcagaggcacacaagcccggttccggcatctctgctcctattggctggatatttcgtattccccgagctcctaaaaacgaaccaataggaagagcggacagcgatctctaacgcgcaagcgcatatccttctaggtagcgggcagtagccgcttcagggagggacgaagagacccagcaacccacagagttgagaaatttgactggcattcaagctgtccaatcaatagctgccgctgaagggtggggctggatggcgtaagctacagctgaaggaagaacgtgagcacgaggcactgaggtgattggctgaaggcacttccgttgagcatctagacgtttccttggctcttctggcgccaaaatgtcgttcgtggcaggggttattcggcggctggacgagacagtggtgaaccgcatcgcggcgggggaagttatccagcggccagctaatgctatcaaagagatgattgagaactggtacggagggagtcgagccgggctcacttaagggctacgacttaacgggccgcgtcactcaatggcgcggacacgcctctttgcccgggcagaggcatgtacagcgcatgcccacaacggcggaggccgccgggttccctgacgtgccagtcaggccttctccttttccgcagaccgtgtgtttctttaccgctctcccccgagaccttttaagggttgtttggagtgtaagtggaggaatatacgtagtgttgtcttaatggtaccgttaactaagtaaggaagccacttaatttaaaattatgtatgcagaacatgcgaagttaaaagatgtataaaagcttaagatggggagaaaaaccttttttcagagggtactgtgttactgttttcttgcttttcattcattccagaaatcatctgttcacatccaaaggcacaattcattttgagtttctttcaaaacaaatcgtttgtagttttaggacaggctgatgcactttgggcttgacttctgattaccctattgttaaattagtgacccctcttagtgttttcctgtcctttatttcggaggacgcacttcgaagataccagattttatgggtcatccttggattttgaagcttataactgtgacaaaaaatgtgaagggaagagatttgaaacatgtggaaggaaaagtgagtgcagactataaacttccaaaaagacaagcccaaaatacacctaaacgttatgtcagattattttgttaaaatcagttgttagtgacgtccgtacgttaatagaaaaaagaatgcttcagtttggagtggtaggtttctagagggatttattgtgaaagtataaactattcagggcaatgggactgagagaacagtgggtagaaaggaccactgaaggaaaggaagagaattggaaggtagatgaaagaaggagcaagaacctggggatgttttttccttttcacttgtaatagtagtaacagaagcaatggcagactggcttttgtttctactgtgttagaatgaattgacaggacaactgggcctattattgtactgtgccagaatactgtaaaacaaaactaaacatactagcttggtggcttgtaattaattacttaagtggagatttttattttttttttattttttttttagacggagtctcactttgtcacccaggctggagtgcagtggcgcgatctcagctgactgcaacctcctcctcacaggttcaagggagattctcctgcctcagcctcccgagtagctaggactataggcatgtgccaccacacctggctaattttgtatttttagtagagatgggatttctccatgttggtcaggctggtgtcaaaactctcgatctcaggtgaaccgcctgcctcagccttccaaagtgctgggattacaggcgtgagccaccgcgccctgcagttttttgtatttttaatagagacagggtttcaccatgttagccaggatggtctcgatttcctgacctcaggtgatctgcccgctttggcctcccaaagtgctgggattacaagcatgagccaccgcgcccggctcaagtggagatttttatatggagtccagttatactctttttaatatataagttgagatgactaatacaacttcaatacaggggctcatgagaaatgtctgtaatatttaagtaacttattgtcttctttcttttttttttaagatgaagtcttactctgttgcccaggcggaagtgcagtggcgtgatcttggctcagggcaacctctgcctcctggtttcaagcgatcttcctgcctcagcctcccgagtagctgggagtacaggcgtgcatgaccacacccggctaatttttttatttttagtagagacggggtttctccatgttggccgggctggtcttgaactcctgacctcaggtgatccgcccacctcagcctccccaagtgttgggattacaggtgtgagcccccgtgcccagcctattatcttatttctgaataaagaattgtctgtgtggggaatagataactctttctcatgcagcccctgctagaaaatttgttttctctagcagttggtctgtgcttataggctactctttgaaagcacaaaaaatttattgacttcttttttttgggtttttttttttttttgagacagagttttgcccttgttgcccaggttggagtgcaatggcgcgatctcagctcaccgcaacctccacctcctgggttcaagtgattctcctgccttagcctcctgagtagctgggattacaggcatgcgtcaccatgcctggctaattttgtatttttagtacaaatggggtttctccatgttggtcaggctggtctcaaactcctgacctcaggtgatccacccgccttggcctcccaaagtgctgggattatgggtgtgagccattgcgcctggccagaaaattcattgacttcctaaagatttattaactttctgcattacttttttttttcccctccatcgtaaatataaaagggaatagtagagaaaatcattcagaattttattttttagtgacattatttagtgacattttattagagtcacttaggaacctgaggctgaataaagttcaggtaaaagtaaaattagttgagaagagacatctgccaaaagaaatctatttttaacttcacttgctgtctttcctagaggaacagaaatagtgctgaatgtcctattagaaatgatggttgctctgcccgtctcttccctctctctcacacaatatgtaaactcatacagtgtatgagcctgtaagacaaaggaaaaacacgttaatgaggcactattgtttgtatttggagtttgttatcattgcttggctcatattaaaatatgtacattagagtagttgcagactgataaattattttctgtttgatttgccagt

SEQ ID NO: 33 - DNA, 6521 bp, Homo Sapiens
acaaaattatgcatgggtaaaagatccaatcaggtgcagttcagaaaaacggattttttttttttttttgagacagagtcttgctctgtcacccaagctggagtgcagtggtgcaatctcggctaactgcaaccttcgcctcgcaggttcaagtgattcccctgcctcagcctcccgagtggctgggattacaggcgtgtgccaccaccacacctgactaatttttgtagttttagtagagacgggagggtttcaccatgttggccaggctgctctcaaactcctgacctcaggtgatccacccacctcagcatcccaaagtgctgggattacaggcgtgagccaccatgcccagacccaaatttttcttgttttctttctttttttgggggtggggggcagggtctcactctgttgcccaggctggagtgcagaggcttgatcttggctcactgaaacctctacctcctaggctcaagcaatcctcccacctcagcctctcgagtagctgggaccacaggcgtgcaccatcacacctggctaattttttgtatttttggtaaagacggggttttgccatgttgcccaagctgttcttgaactcctgggctcaagcgatcctcttgcctcaccctcccaacgtgctggaattgcaggcatgagccaccatgcctggaacaaagttttatttttcaagtggatcatttaaaaaaatgctttatggccaggcacgccacttctctccagcctgggcaagtgagccgagattgtgccactgcggtctggtctgagcgacagagggagactccatctcagataaataaataaataaaattaaaacaaatttaaacattctttatatgacaaaattattctcaatggcaattataaaatgaataataagggccaagaaataaactcagtgaatattttctttccttgaactttgtaaatataatcatgtcagcataaaaacagccatgcattgcttaacaacagggatatgttctgagaaatgagtcactaggcaattttgtcattgtgcaaacatcatagagtgtattttcacaaacctagatggtgtagcctattacccatctaggctacatggtatagcctggtgctcctaggccccaatgcttacagcatgttaccatactgaatactgtaggcagttgtaagacaatggtatttgtgcatctactgtagagacagggtctctccgtctgtcgcccaggctggagtgcagtggcataatcatagctccctgcagcctccaactcctgggctcaagtgatcctcccacctcagtctcccaagtagctaggactacacgcttgtgtcatcaggcctgtctactgtttttgtttgttttttggtagagatggagggtctcactatattgctcagactggttttgaactcctggcctcaagcaatcctcctgctgccttggcctccaaagtgctggtattacaggaatgagccaaaagctcaatatggctgttgaataaaagactgactcaatcaagtacggaccctgcccttatggagctgaaggccgttagagcagataaaatgagttatcacccttatatgagttagacggtggacaaagttattattgagggcaggcaaagaactgggttggctcaaagatgccagggatcttttccagactagtggtagagggttggttaaggagtttcctgaaggaggtggcctttcatctgagtttcaaagaacagaagagattagacagggaggacagtaaaatttttttttttttttgaaacagtctcgctttgtcgcccaggctggagtgcagtggcgcgatcttggcttactacaagctttgcctcctgggttcacgccattctcctgcctcagcctcctgagtagctgggactacaggcggccgccaccacgcccggctaattttttttttttttttttttcagtagagacggggtttcactatgttagcgacgatttttgtctgtttgtttgtttttgagacagagtctcactctgtcgatcaggctggagtgcagtggcgcgatctcggctcactgcaacctctgcctcccaggttcaagtgattctcctgcctcagcctcctgagtagctgagattacaggtgcctgccaccatgcccagctaatttttgtatttttagtagagacggggtttcaccatgttggccaggctggtctcgaactcctgacctcaggtgatctgcacacctcggcctcccaaagtgctggtattagaggcatgagccactgcacctggccagtaaaactatttgtgacacagcagcaagtgcacaagcactgacctatcagagttgaaggtggctgaggcactcaagtgggctcctggggactctgttatgccagggaatacctctttagataagggatcaggaggtctggagggtccctaaggaagagctagggtagcaggggtaccctggagctaggggccatggctatatgccaacaggattagaaatatcttaatgtatttaattaacctacacaaccatattggtgggtgcctactgaatattagccctagatatggacctgaaatggccttattctcttttagtttgtttaagccaatggagccttactagaatgtgagctacaaaacagtagagctattctctattcaatgctgcatctgtagggcctagaacagcacctgaaggactggcggaggcttaataaattgttaaaagggcagactagccaggtgtgatggcgtgtgcctgtagtcccagctacttgggaggctgaggcaggaggatcacttgatcccaggatttctgggctgtagtgtagtataccagtcaggtgtctgcactaagttctgcatcaacctggttgcctaaggatggttgaactgacccaggtggaaattggagcaggtcaaaactcaatgctgatcagtaacagggtcgcacctgtaaatagccaccgccctccagcctgggcaacacagtgagatcccatctctaaaataaattttaaaaataattaattagaaaaaaaaaccagcctgtaatcccagcactttgggaggccaaggcgggcagatcacctgaggtcaggagttcaagacaagcctggccaacatggcaaaaccccaatctctaccaaaaatacaaaaattagctgggcgtggtggcaggtgcctgtagtcccagctacccaggaggctgaggcaagagaatcgcttgaacctgggaggtggagattgcagtgggccgagatcgcgccacttcactccagcctgggtagcagagtgcgactctgtctcaaaaaaaaaaaaaaagaaagaaaagaaaagaaaaagaaaagaaaagaaaaaaactgggaggcctaagcccattcttggtgtcctcacactcttctgccccatctccttgcacccagtcttcccctgcaatctgtgctccatactagccctcaagccctcaacgtgacctagtatgagaactggattctgtcactctcctgctcataatattttatgccttccctttgcccagaatatcattctccctattgtttttaccaatggaactggtatttcttcaaggacatgatcaaatttgcctacttctatattatcttctaaagcagaattcatctctcttccctcaatatgatgatattgacagggtttgccctcactcactagattgtgagctgctcagggcaggtagcgttttttgtttttgtttttgtttttcttttttgagacagggtcttgctctgtcacccaggccagagtgcaatggtacagtctcagctcactgcagcctcaaccgcctcggctcaaaccatcatcccatttcagcctcctgagtagctgggactacaggcacatgccattacacctggctaatttttttgtatttctagtagagacagggtttggccatgttgcccgggctggtctcgaactcctggactcaagcaatccacccacctcagcctcccaaaatgagggaccgtgtcttattcatttccatgtccctagtccatagcccagtgctggacctatggtagtactaaataaatatttgttgaatgcaatagtaaatagcatttcagggagcaagaactagattaacaaaggtggtaaaaggtttggagaaaaaaataatagtttaatttggctagagtatgagggagagtagtaggagacaagatggaaaggtctcttgggcaaggttttgaaggaagttggaagtcagaagtacacaatgtgcatatcgtggcaggcagtggggagccaatgaaggcttttgagcaggagagtaatgtgttgaaaaataaatataggttaaacctatcagagcccctctgacacatacacttgcttttcattcaagctcaagtttgtctcccacatacccattacttaactcaccctcgggctcccctagcagcctgccctacctctttacctgcttcctggtggagtcagggatgtatacatgagctgctttccctctcagccagaggacatgggggccccagctcccctgcctttccccttctgtgcctggagctgggaagcaggccagggttagctgaggctggctggcaagcagctgggtggtgccagggagagcctgcatagtgccaggtggtgccttgggttccaagctgagtccatggccccgataaccttctgcctgtgcacacacctgcccctcactccacccccatcctagctttggtatgggggagagggcacagggccagacaaacctgtgagactttggctccatctctgcaaaagggcgctctgtgagtcagcctgctcccctccaggcttgctcctcccccacccagctctcgtttccaatgcacgtacagcccgtacacaccgtgtgctgggacaccccacagtcagccgcatggctcccctgtgccccagcccctggctccctctgttgatcccggcccctgctccaggcctcactgtgcaactgctgctgtcactgctgcttctggtgcctgtccatccccagaggttgccccggatgcaggaggattcccccttgggaggaggctcttctggggaagatgacccactgggcgaggaggatctgcccagtgaagaggattcacccagagaggaggatccacccggagaggaggatctacctggagaggaggatctacctggagaggaggatctacctgaagttaagcctaaatcagaagaagagggctccctgaagttagaggatctacctactgttgaggctcctggagatcctcaagaaccccagaataatgcccacagggacaaagaaggtaagtggtcatcaatctccaaatccaggttccaggaggttcatgactcccctcccataccccagcctaggctctgttcactcagggaaggaggggagactgtactccccacagaagcccttccagaggtcccataccaatatccccatccccactctcggaggtagaaagggacagatgtggagagaaaataaaaagggtgcaaaaggagagaggtgagctggatgagatgggagagaagggggaggctggagaagagaaagggatgagaactgcagatgagagaaaaaatgtgcagacagaggaaaaaaataggtggagaaggagagtcagagagtttgaggggaagagaaaaggaaagcttgggaggtgaagtgggtaccagagacaagcaagaagagctggtagaagtcatctcatcttaggctacaatgaggaaattgagacctaggaagaagggacacagcaggtagagaaacgtggcttcttgactcccaagccaggaatttggggaaaggggttggagaccatacaaggcagagggatgagtggggagaagaaagaagggagaaaggaaagatggtgtactcactcatttgggactcaggactgaagtgcccactcactttttttttttttttttttgagacaaactttcacttttgttgcccaggctggagtgcaatggcgcgatctcggctcactgcaacctccacctcccgggttcaagtgattctcctgcctcagcctctagccaagtagctgcgattacaggcatgcgccaccacgcccggctaatttttgtatttttagtagagacggggtttcgccatgttggtcaggctggtctcgaactcctgatctcaggtgatccaaccaccctggcctcccaaagtgctgggattataggcgtgagccacagcgcctggcctgaagcagccactcacttttacagaccctaagacaatgattgcaagctggtaggattgctgtttggcccacccagctgcggtgttgagtttgggtgcggtctcctgtgctttgcacctggcccgcttaaggcatttgttacccgtaatgctcctgtaaggcatctgcgtttgtgacatcgttttggtcgccaggaagggattggggctctaagcttgagcggttcatccttttcatttatacagg

SEQ ID NO: 34 - DNA, 2891 bp, Homo Sapiens
  unsure (223, 366): unknown base
cccctttcccccgaattgttttctcttttggaggtggtggagggagagaaaagtttacttaaaatgcctttgggtgagggaccaaggatgagaagaatgttttttgtttttcatgccgtggaataacacaaaataaaaaatcccgagggaatatacattatatattaaatatagatcatttcagggagcaaacaaatcatgtgtggggctgggcaactagctnaagtcgaagcgtaaataaaatgtgaatacacgtttgcgggttacatacagtgcactttcactagtattcagaaaaaattgtgagtcagtgaactaggaaattaatgcctggaaggcagccaaattttaattagctcaagactnccccccccccccaaaaaaaggcacggaagtaatactcctctcctcttctttgatcagaatcgatgcattttttgtgcatgaccgcatttccaataataaaaggggaaagaggacctggaaaggaattaaacgtccggtttgtccggggaggaaagagttaacggtttttttcacaagggtctctgctgactcccccggctcggtccacaagctctccacttgccccttttaggaagtccggtcccgcggttcgggtaccccctgcccctcccatattctcccgtctagcacctttgatttctcccaaacccggcagcccgagactgttgcaaaccggcgccacagggcgcaaaggggatttgtctcttctgaaacctggctgagaaattgggaactccgtgtgggaggcgtgggggtgggacggtggggtacagactggcagagagcaggcaacctccctctcgccctagcccagctctggaacaggcagacacatctcagggctaaacagacgcctcccgcacggggccccacggaagcctgagcaggcggggcaggagggccggtatctgctgctttggcagcaaattgggggactcagtctgggtggaaggtatccaatccagatagctgtgcatacataatgcataatacatgactccccccaacaaatgcaatgggagtttattcataacgcgctctccaagtatacgtggcaatgcgttgctgggttattttaatcattctaggcatcgttttcctccttatgcctctatcattcctccctatctacactaacatcccacgctctgaacgcgcgcccattaatacccttctttcctccactctccctgggactcttgatcaaagcgcggccctttccccagccttagcgaggcgccctgcagcctggtacgcgcgtggcgtggcggtgggcgcgcagtgcgttctcggtgtggagggcagctgttccgcctgcgatgatttatactcacaggacaaggatgcggtttgtcaaacagtactgctacggaggagcagcagagaaagggagagggtttgagagggagcaaaagaaaatggtaggcgcgcgtagttaattcatgcggctctcttactctgtttacatcctagagctagagtgctcggctgcccggctgagtctcctccccaccttccccaccctccccaccctccccataagcgcccctcccgggttcccaaagcagagggcgtgggggaaaagaaaaaagatcctctctcgctaatctccgcccaccggccctttataatgcgagggtctggacggctgaggacccccgagctgtgctgctcgcggccgccaccgccgggccccggccgtccctggctcccctcctgcctcgagaagggcagggcttctcagaggcttggcgggaaaaagaacggagggagggatcgcgctgagtataaaagccggttttcggggctttatctaactcgctgtagtaattccagcgagaggcagagggagcgagcgggcggccggctagggtggaagagccgggcgagcagagctgcgctgtgggcgtcctgggaagggagatccggagcgaatagggggcttcgcctctggcccagccctcccgctgatcccccaaccagcggtccgcaacccttgtcgcatccacgaaactttgtccatagcagcgggcggacactttgcactggaacttacaacacccgagcaaagacgcgactctcccgacgcggggaggctattctgcccatttggggacacttccccgccgctgccaggacccgcttctctgaaaggctctccttgcagctgcttagacgctggatttttttcgggtggaaaaccaggtaagcaccgaagtccacttgccttttaatttatttttttatcactttaatgctgagatgagtcgaatgcctaaatagggtgtcttttctcccattcctgcgctattgacacttttctcagagtagttatggtaattggggctggggtggggggtaatccagaactggatcggggtaaagtgacttgtcaagatggcagaggagaaggcagagggaaaacgggaatggtttttaagactaccctttcgagatttctgccttatgaatatattcacgctgactcccggccggtcggacattcctgctttattgtgttaattgctctctgcgttttggggggctgggggttgctttgcggtgggcagaaagccccttgcatcctgagctccttggagtagggaccgcatatcgcctgtgtgagccagatcgctccgcagccgctgacttgtccccgtctccgggagggcatttaaatttcggctcaccgcatttctgacagccggagacggacactgcggcgcgtcccgcccgcctgtccccgcggcgattgcaacccgccctgatccttttaagaagttggcatttggctttttaaaaaacaataatacaatttaaaacctgggtctctagaggtgttaggacgtggtgttgggtaggcg

SEQ ID NO: 35 - DNA, 1092 bp, Homo Sapiens
aagcttccccttcatcatccaagaaggcattcaggtctttctgtgctaggccccaggtaaagtgctggactacccagtaattgggttcagtagcaggatggcctcagattgaggtcccagggccaaaggaccactcctctcctcagcgctggtccgggaaaggcaagctccgggcgggagcgcacgccgcgcccccgaagcctggctccctcgccacgcccacttcctgcccccatcccgcgcctttccaggtcttctcccggtgaaccggatgctctgtcagtctcctactctgcgtcctcggccgcggcccgggtccctcgcaaagccgctgccatcccggagggcccagccagcgggctcccggaggctggccgggcaggcgtggtgcgcggtaggagctgggcgcgcacggctaccgcgcgtggaggagacactgccctgccgcgatgggggcccggggcgctccttcacgccgtaggcaagcggggcggcggctgcggtacctgcccaccgggagctttcccttccttctcctgctgctgctgctctgcatccagctcgggggaggacagaagaaaaaggaggtagaatggatccccttggccttcccctgtggtcgggggcgggccagggtgggccgcgttgcccaggcagccctgccgtgttgctaggcagcctggtcgccggcgtgggcgatgccggcgctggggcgggagccgcgagggtgggaggccctggggcgtttccgggacgtggagttagcagggttctgacttgaaaaacgacggcaaagcgtgttcttgactgcttctgagcacctcacacctttcagacccagggcgcctttattcccagctggaagcccagcttagagcaatggtgccactaaaaggggtgtgttggatgtgaaaataccctttggaagtatttataagcctgcaggaaatatgttttccttattttcttactctgctcccttcattacccatttcaagaagcaacagaacctgtgcagagtgtgttttaagttacactgtatgtttatttttgtttatgttgaactcggtgtatacttgtgagaataagctt

SEQ ID NO: 36 - DNA, 5203 bp, Homo Sapiens
agggaacccaacgcccctccggggcagaagggggcagcgcgcgcgaggcggaaggacagtcactctcgctgcacaaactttcccgcgggccgcgccgcgcgtgcaggggctggacgccacccggcgccagagccgggcctgaggagcggggtctggccgggaacgagggctgccagcctgggtggtgtcatttgttgcttcatttttcattccctttcctctcgtgaggaatcagaggcatcgggccgcgcgggctgagaattcttaaattctccccggccgcattcggctgagccaacccgcagttcctgtcagcccctctgtcccccgggcagcggttttccccgctagccaggtttggaagtcaccctctgtgagactgggttaggaagtgacgaaaagcgccgaattgttttcaaattgaaaatacttttttttttttttttggagatagcgctgacaaatatatgggatcccggcttttgatccctggctgccgcctctgttctcctgtcgctaataaaactcgcattgagccccttagtgccttgattaacaggcagattaactcttactggggttgggaacagcttgtcctaatcaatgtcattttaaaagcccgtcaggatgcgcttagcttcggttccctggatgcttgagcgagccagccatgacatttgctccctccccctccccagcctcaaatcccccagtaaagcccccagttcccgcctgcctgttcccaggtctacaacgggacaaatcgcaggaccgggtcgttggcctttagaataggcagcggtttagagaggggatatccagggagaagggactgaggtggccttgacttgcttgcttttcctttgaagctgaactcttgcctcttgggggcagaggttacagggaaaagagagatggggggatcgtcacagggtgatgaaatggaaagcaaacttttctaggaaccctatttgcaaaaatcggagagtgccgctgatttcagttgtcctacatgtcaggagttttaaacctaactcctatctggacaacagcatggagggactgggaggcaaagccttgggagtctgacccgctgggctgctaggaatccctttgctgggagactccactggacaatgttattttaaaggtattttgggggtgggcagggagaagacagagagagaaagagagagagagagagagagagagagagagagagagagacaggctggcctcccagagcgaacggaagaggactgaggactgaacccagggagcccctagcactggccatttggcaggaggcgaggaagggcgagggcaccgcggcttccccccaagccgagcagtggccacagcctgaaggtgccacggggcggctctgggatcttcttggcttttctaggctctgggctcggcgaggctgccgggttagcgggaaccggcaggttgctggagaaaggagagggacaaaggcctggaagtgggggaggcaccagggactgggcggccgggatgggagcctttgcctttagggctcactggacccgtttgccagctccgcggacaagggatcccaccttcccagggtctgcaaaaagagagacgtttggggcactacaaagtgacgcaggtgtctgccaagactttccttctccaaaaaatgccagtcttcaccctttccagcgcgccggcgctgcgcctctgcttgaccggggaaagagagagtttggaggtgtcagaactgtcagaactccggatgggaggctcttggttctgaagctgggagctggaggcacttccccccagaagtgggcacttctttgcctccccgaaggcctgatggggtgggcacaggggaatgccagggatcggtgcgggtgagatgcttgcctcacctcatgttgacgcatcaatactggctagaagctctgggcaggctctggcgagccacggtcccccagcgggactccctccacgcagacagccccgctaccgggtgggacgaccccggcggcccccgcgggaacgcacccgccggcctgagaggtcctccctctggccacagggggcggagggtaggggggaacaggggcctgtggggaggcggggaaaggagacagaacctaaagcgcaatccccgccgcccccccgcgtcttggagggcagcaagtgggcctcgggcgtgttggtagccgcaattaaaatggcgacctgcgagttgtctcggttttgtacacacctctggcaaccgcgcccgcacctcagtctcggcccccacacccctaggccgcttcgcccccagagccggtacttggcagagggagtgaggctccccacgaggtagaacagcacccccaccttccttgagaccagtccagagagaacgaggaaatctcactctcacccctctctccttaaactttgaaaactcggcctcattctggggttgaactcccctccccaaatattgacacatgggaagcagccaagtcctttttgttttttgtttgtgcggaggagtttccaggagtctttcccggagcccccttccccacccaatgacgtcagtggcattcactcctcgctccttgccttttctgattttttgttaaaacttttctccgcagcgagatgggggttggaggggtgggagaaggagctgattcaaagagccagtgccctggggggaaatagcaacaagattacggctgcttctttccgaggcaaagcttaagaaggtgctaatccactcggtcgctaattgagaggttgtaaaaatgatactcgcctccagttcggacagaatcacttcccccccccccgcccccccgcaagtccctcgctcatgcacagcggacttgagtcttgagtccaagcttctttaatgctcgcttggaaagtaaaaggagagagaaagagaaagccgactttcgctggtctgggactcagggccgcggccccacttgccggcatcctccgaaagtcgcgctcctgcgaaatgaaacctcgcccaggaggccgcggacctggacacccggcgccacctccttcacctctgacccaggtttcctcccggcgctgcgagctcccggggaagggttagagccggcagccctccccagcccggggaggggagagggttatgcgaccccacctctggctagggccggggaggcctttgcttcccgggagccctgcccgggctccttggtcgcagggctgctgggtcccaggcaggaacgagagggtgaggcccacatgtggcccggcggcccagggcggcttgcagcgtcctcactgtcccggctgccaggggctgcggcgacgcggccagtcagcagcgagttcaggtcgcgcagattttattgatgagctctgactttcagcactttccctaagtcaagaagagtctagcgtacccttcggctgcttcatttcagcctccctgcctcagctcttcagccctattccccctcgccctgtcctggggtgtgtacagcagcccaggccttccttctccttcccggctccgtggcccgaagccgccgagagagctcgggacagcgcaggaccaggcagccgctcgctctcctgtcaccttaactgcaggctccgaggggcgcctttggagtgtactgaggtgtgtcctaatcgtgcggcattcaacaaatggacttctggtgtgtggtcagaagagaaaagccatttacttactttcctccccggttttctggcaacagctgaaggggagctgcctccgtggactgagcagacccaggagagggagtcgtggtgcggagacacacgcaccacacacagatgaccggtggcacacacgacacacgctgacataccgacatcgccagtgggacacacacacacacacacacacacacacacacacacacagagagagagagagaatccctcccagcattggtcatccgcccccccacccaggcttccactccccctcccctcttatctcccctggcttcccctcctctcgggcgctgcgaaaagcagccgcacttagtcaacaaatggcacgtgggagaagttggtgagtgtttggtgaggactcttcagggcttttcacaagaaccctctgtacacaaagtaagtggcgtgtttactcgggcctctccagccagagctgtgcctctgctccgctgcgcaccgcggcttccgaaaggagaaaggagagaagaaagggcggggagagcggggtggaggatttggacaggccctggaggcttgggctggggaggcctctggcctcgtttagttctcggcccggcaacctcctctcggcctaggcttcgccgcggcctccgcagctggaatggagctgccaggacccagtgacgctcccgcccctttcctcttcttccaaggggccaggtgggctggggtgcggccgccgctgtgctctgtgtcttggggccccggctgggatggggtgggggcgggcgggggcggggcggcaggccacgctgtcctggagttggcaagaaaggacagcacagaaacttgcaccctccgaggactgggagtcccgagtccagcttagggggagtgggggcgcgacccccaacccagaaaccttcacttgaccgctcaagttcgcggcagcagggcgggccgcgccgaatctcggcgtgcgcggagcggggagatgcaggcgagcgccagagcccgggctcgggggccctgcgccggggagaggagccgggacccaccggcggagccgaaaacaagtgtattcatattcaaacaaacggaccaattgcaccaggcggggagagggagcatccaatcggctggcgcgaggccccggcgctgctttgcataaagcaatattttgtgtgagagcgagcggtgcatttgcatgttgcggagtgattagtgggtttgaaaagggaaccgtggctcggcctcatttcccgctctggttcaggcgcaggaggaagtgttttgctggaggatgatgacagaggtcaggcttcgctaatgggccagtgaggagcggtggaggcgaggccgggcgccggcacacacacattaacacacttgagccatcaccaatcagcataggtgtgctggctgcagccacttccctcacccacactctttatctctcactctccagccgctgacagcccattttattgtcaatctctgtctccttcccagg

SEQ ID NO: 37 - DNA, 8085 bp, Homo Sapiens
  unsure (2545): unknown base
gctccatgacctaatcactccccaacacctcctcctactaagactatcacattggtgattgggttttgacacacagatttggggagaacacaaacactcatatcacagcacctactaatttatccagccatttcactgctaggtatttacccagaaaaaatgaaaacacatgttcatacaaagacttgtacaacattttcatagtagctctatttataataccaaaaaaattggaaacaactcagatatttatccacagttaaatggataaacaaactatagtatataaataaaaagaataaaaagaattaactattgatacatactataatttagctgaatctcaaaataattatgctgagtgagagaaaccaaatgaaaaaaagatacactatattatatacaattctaagaaataaaacctaatttatttggcacccagatcttcatttctataccagtttcaaataaaaagtctcaaacttccttggataaatggctgattctacgactggggcaggaaatatacaagatgagtctgatgagtctgtagcatcttgtaataccagaaagtaggaaagtccacacatacacacacatacacacaatacagagagtgggtcaaggagcacaagagtcaactgaaaaagcccccagtgccaaaaactggaaaaatttgagcaacaaagtattcatgaatccatacaaagaaaagactgaataaagaagtaaatgggggagaagaagcaaatcttcctcacagaattccaaataaattatgtagatactccactccaaaggagggctagcataactccctactcccccacacttccttaagtgactcataatgatttccttccaaagagtacagagtatgcaaagagggaaaaaagagtaactatgcaatggagaaacctgacaaacactacttcagccaggtgatggagaacaacattaacagtcataagtcatgttgacaatatgtacccttcatatgatgtaataaatacagtacattacctctttgatttccaccccgccaaaacccaaaaccctagtctactcatgaggatacatcaaatcccaatagaagggcatcttgcaatatacctcaccagtactcctaaggactgtcaaggtcatcaaatacaaggaaaatctgagaaactctcacagccaagaggagcacaagacatcataacaattaaatgtggtgtcctggatggaatcctggaaaggaaaaaggacattaagtgaaaatgaagaaaatctaaataaactatgaatattagttaataacaatttatcagtattagttcattaattgtaacaaatgtaccctattaatttaaaatgctaacagagaaaattgtacaaatgatatatgagcattctctatattatctgctcaatttttctgtaaatccaaaatcgtttcccaaaagtaaaatctattaataaaacatctaaagcaaacagacctaaaaggcatatgcaaatgtataatttaatgtttaataaatcagatataaatatttttaaaaacctaatatttggtgacagaaagcagattagtggcttgccagaaagtggtgattagtactaggggaaggggatgggacagaacagtatgaagggatttaaaaaatggcatgaggaaacttttggaggcaaagggtatgtttatcattttagtttcacaggtctaacaacaaattatacaatttaaatatatgcagcttattatatgacaactatatcttgataaagtggtttttttccccaaactatagaaaaaatacttccacatttaaatcctcttctccaaaaacagtcttcaggaatatttgaagttagccccatcacacctgaatttaatcagtgaattttgttcattcaaagattcatacatttgggaagttcctgtgccaaaaatgctaatcacccagcatcaaaatttatggaataatggtgatttaggacatgctggacatctttattgttgttttcccacttcaagattttcaatcttttggaaacaacctccccagacattctgacaagggaattattataaccaaccaaaatcaagccaaatatagtttgtcagatttaaaatgaggccaagtgccaattttacagcagcgaccggaaaatcaaattatatggcatctgacatttaaaatcacactcctaagaaggctgtcatttgatgtcttgggtttgggttacagtacttaactttataatactgggtaaccttgtgcctcagttttcccaactatgaaattgggataacagtacctattttgtgagactgttgaaggattacagttaacacaggtaaaaggcttacaagactacctggcaatgctgtcctgattttacaaattctatacactgtgtggcattagccatcaggaaaatataaataaatcagtgagataccacttcacacacttggggggctataacaaaaaagacagataaaaaatgttgtcaaagatgtgaagaaactaggacccttattcactgctggtgnaaatgtaagaagtacaatcatttgaaccatagtctggcagttactccaaagaccacacctagagttgccatatgaaccagcaattccactcctatgcatatatccaggagaaaggaaaatatacgctgcacaaaaacttgtacatgaatgttcattagcaggatttttcatggtagccaaaaggtgtaaacaacccaaatgtccaacaactgatagagatggataaataaaatgtggtttatccatacaatgaaatattatttgtcaataaaaaggagtgaaggagtgaagtactgattcatgtggaacatggatgaaccttgatccaaaatagccaaatcacaggtacaaaaagcatattagtggctgctgggagatttaggcggaaatgtggaataactgctagtgggtattgagattttagagtcatactcatgttacaaaattaatagtgctgatggttgcacaactctgagtacatgaaaaatcaatgaactgatactttgagtgagctgtatgatactggaattacacctcaataaagcatggtaactgttttaagataggctggaaagagaaagcctgaaaacaacaataatgatattaataaattagtttacttctctagtctcatatacttctgtgcccacacttgctcctgttctattcataatggtccccttgcagttgccatattatatcctgccatttgatgcccggtgaacattctatacctgcttcccagaattctctttacctttcctctatctgcctaacttccacatatctaaaattaatcagagtaaactatttactagaacaaccaactccaaatcctagtaacctaacatgataaaggtttgtttctcactcatatagcccctccccagatgatcgaggggtccaggctccttacctctagtggctcccccaccttctggagtcttctgcattctttatacatggttgagataaactatgagtcattagcacagctagaccttgaggtcctacaagaaaatttgcaaatcattcactctgttttgaacaaggtatatttaagatgatgttaaaatacccaatggtcttgggtcaaatacagtttatgactgtgtatctaaaatatatattgcaatattcttccctttttctactgacttcatgaatttagcggggatccattttataagctcaaagataattacttttcagactaagaatatttagggtaaaaagtactgttcaacatctctactgaggatgttatgatgtagcacactgtataagctggagctaaaggaaactttccttaaagtgctatttactaaaaattggaacacattccttaagacaaatcgaagtgtggcacacaacatccaaacttccatcatagatacagaggtgttaccatctcccactcccaaatttctttgtcacgctgaggatactcaagaggagcaggacatgttggtcgcagcaggagaaacttgaaagcattcacttttatggaactcataagggagagaatttcttattttagtatcgtccttgatacatttattattttaaaagataatgtagccaaatgtcttcctctgtgttaaatctttacaaaactgaaatcttaaaatggtgacaaaaattctacttctgatagaatctattcatttttccaattagatagggcataattcttaatttgcaaaacaaaacgtaatatgcttatgaggttccatcccaaagaacctgctattgagagtagcattcagaataacgggtggaaatgccaactccagagtttcagatcctaccggtaattggggtagggaggggctttgggcggggcctccctagaggaggaggcgttgttagaaagctgtctggccagtccacagctgtcactaatcggggtaagccttgttgtatttgtgcgtgtgggtggcattctcaatgagaactagcttcacttgtcatttgagtgaaatctacaacccgaggcggctagtgctcccgcactactgggatctgagatcttcggagatgactgtcgcccgcagtacggagccagcagaagtccgacccttcctgggaatgggctgtaccgagaggtccgactagccccagggttttagtgagggggcagtggaactcagcgagggactgagagcttcacagcatgcacgagtttgatgccagagaaaaagtcgggagataaaggagccgcgtgtcactaaattgccgtcgcagccgcagccactcaagtgccggacttgtgagtactctgcgtctccagtcctcggacagaagttggagaactctcttggagaactccccgagttaggagacgagatctcctaacaattactactttttcttgcgctccccacttgccgctcgctgggacaaacgacagccacagttcccctgacgacaggatggaggccaagggcaggagctgaccagcgccgccctcccccgcccccgacccaggaggtggagatccctccggtccagccacattcaacacccactttctcctccctctgcccctatattcccgaaaccccctcctccttcccttttccctcctccctggagacgggggaggagaaaaggggagtccagtcgtcatgactgagctgaaggcaaagggtccccgggctccccacgtggcgggcggcccgccctcccccgaggtcggatccccactgctgtgtcgcccagccgcaggtccgttcccggggagccagacctcggacaccttgcctgaagtttcggccatacctatctccctggacgggctactcttccctcggccctgccagggacaggacccctccgacgaaaagacgcaggaccagcagtcgctgtcggacgtggagggcgcatattccagagctgaagctacaaggggtgctggaggcagcagttctagtcccccagaaaaggacagcggactgctggacagtgtcttggacactctgttggcgccctcaggtcccgggcagagccaacccagccctcccgcctgcgaggtcaccagctcttggtgcctgtttggccccgaacttcccgaagatccaccggctgcccccgccacccagcgggtgttgtccccgctcatgagccggtccgggtgcaaggttggagacagctccgggacggcagctgcccataaagtgctgccccggggcctgtcaccagcccggcagctgctgctcccggcctctgagagccctcactggtccggggccccagtgaagccgtctccgcaggccgctgcggtggaggttgaggaggaggatggctctgagtccgaggagtctgcgggtccgcttctgaagggcaaacctcgggctctgggtggcgcggcggctggaggaggagccgcggctgtcccgccggggcggcagcaggaggcgtcgccctggtccccaaggaagattcccgcttctcagcgcccagggtcgccctggtggagcaggacgcgccgatcgtccgggacgtccccgctggccaccacggtgatggatttcatccacgtgcctatcctgcctctcaatcacgccttattggcagcccgcactcggcagctgctggaagacgaaagttacgacggcggggccggggctgccagcgcctttgccccgccgcggagttcaccctgtgcctcgtccaccccggtcgctgtaggcgacttccccgactgcgcgtacccgcccgacgccgagcccaaggacgacgcgtaccctctctatagcgacttccagccgcccgctctaaagataaaggaggaggaggaaggcgcggaggcctccgcgcgctccccgcgttcctaccttgtggccggtgccaaccccgcagccttcccggatttcccgttggggccaccgcccccgctgccgccgcgagcgaccccatccagacccggggaagcggcggtgacggccgcacccgccagtgcctcagtctcgtctgcgtcctcctcggggtcgaccctggagtgcatcctgtacaaagcggagggcgcgccgccccagcagggcccgttcgcgccgccgccctgcaaggcgccgggcgcgagcggctgcctgctcccgcgggacggcctgccctccacctccgcctctgccgccgccgccggggcggcccccgcgctctaccctgcactcggcctcaacgggctcccgcagctcggctaccaggccgccgtgctcaaggagggcctgccgcaggtctacccgccctatctcaactacctgaggtgagggcccgggacggggcacgcccagcgcgtccgggagtagcggttccgttggcggcggcggccgccaaccctcagccccagccccagcgcaccgctgcgctccccggggcggccggagagggtgggcagcgggacacagcacaggggcagttgcctcccttcttcttccctcctctcctcactcttggggacacgaaggtgggcgcagaatatactatttttggggcgtgcctccctgaaagctgtttttttgtttgttttttaactttccgaatcttccagattccgaagcagaaccaaccccgatttaaaacgtgcagcgtcacactaggtccgctgtagcccagtggggcagaaagtgcgcggcgagttgggggctttatgaaatgcttctttcttagaagaaggacgtttaccaggagtgcttgtcttggagaggagttaaggcaccgttcccccgggaggggtgggacttgagaggtggccggccagaaccgaaagcagcaccatcttagggatttgaacacttcagtggctcagttttcttaagaatctcaagattaaaattaagttcacgtgggaaatgtttaaactgtggatttaaacgcctgtcactgcattgcaccgttttcttattattgcttgctattcactacaattttttttatatacaggtttaaaaaacactactttgcatactgaagtaatggaatgtaaaaaaagaatgctctgtttggaatcttatgttgtgaataggcaaaacagtgtcagtgtattggacaatactttaaaatgacaaacatatacttgcttaagtaagcaatgattacagggttgtgttttaaaaactcaaaaccaaaacattgcaaagtaccatcgaacttttaaagccaaaccatatttgttttgacccagcatacagacaggaaggacataacatttcatttgtcaaagactaaattgtttctatataaagagttttgtagaaagatttccttttaaccgactttaactttctaggacataatattatacactaattattgttcttttatattggtgctactgatgaatggctaatcatttgcaagtatggtgaatccagttacggatagtctattaccaagtttagtttgcatgtctttcaagtgtatatatacagttctgtttttaaaatctcctttcaccctgttaatactggtttaagaaacctttagtattagatagtggtgcacttaaaaataaatggagtactttgttttgcatttcaagg

SEQ ID NO: 38 - DNA, 7110 bp, Homo Sapiens
tgttttttgtgatgccttagaggccagaaggatgttttgaaggggaaaattgtaggagttaggcagagcagggttttggctccttctcaatgtccctctacctagacaaattcgggctattctgcagaggttgcagtgagccatgatcacgtcactgcactccagcctgaggaacagagggagactccgtctcaaaaaaaaaaaaaaaaaaaaaaaaaaaaaaaaaaaaaatttcggcctactctatgaagcacctggtaggtgtcccaatattttctggtatatgggaattacctttttctattattggaaggtctaaaaagcaaacaatgtgctccatatggctagagttagtattaaggggaccaagtagaataattggtagctagtgttagcctggagactaacatagtcaaagctgtcttgtcatgttatgtcttttttatttgtattgctccacggtccaagacaaaatttctgaacgccacttggacacagtgagtacctggtctgctctattgttctcaggagcaaccaactcaacccttatttctctgagaatgatgatttcatacagcacatctctctaccaagatgtgaaagatgacaccatggcatctgaaatagcttcaggagagatttgggacatgggaagcttgtagacaataatggaaaattctcttttagaatatagttacttgtatgacccacagtagcgccttttggagaatgtcttaaaattatctttattgaaagaacaataatgtttgttattaggataaatgaaataaggggaaaacctcagacccttggaacaatgggtttacattcaatccaatgattattatgtttttatattctgtattatttagaaaacagtagttaaacagacagaaatacagaagattgtttaaaaattaaagctattgagttagatccctttttgaaaggtcagcgtatgggagatgagaaaggcactatagagatcagagtgtttacacaaaagacatcttagcagatgacctacaaagagcacatcaagtatttatatcatccacatcaagttgctggtcatttcgcttatcaaagaaaataagaaagaaattttctttcgacattattttggtgtagtaacaatagagttttggaatcagctgttagaagcgataattaaagctagtttaccatgcttactaatcaatctacatagtcaccctgaagctttatataattgtccctttgttacaagcttctacttctccctatggtattctggttctgaatccagacaggtaaagaactaagtatggccgggcgcggtggctcacgcctgtaatcccagcactttgggaggccgtggcgggcagatcacgaggtcaggagatcgagaccatcctgaccaacatggtgaaaccctgtctttactaaactacaaaaaattagcccggcatgatggtgtgcgcctgtagtcccagctactcgggaggctgaggcaggggaattgcttgaacctgggaggcagaggttgcagtgaaccgagatcatgccactgcactccagcctgtgagactccgtctcaaaaaaaaaaaaaaaaaaagaaaaaaaaaaaaagaactgaagtgcttggagaccagtgtattgtaatatctatacagccaagcaggtattttcaactgaactttaaaaaagtactatttttgaaactttctttagtttagatagggccagccatttgggtagaaaggaaaagaaaaacaaaaaattggaaaaggatgcatcagtatttctttcagaaacaacttaacactaggaacagaaggaggattttattcaccaactcctaataaccacctgatgttgctgttgggctggccaaatatctgccaacattgatgatcctttcattcaccactagagagaagtagagggacctgatgtttagagaagcagtaaaacccatttcccattttctttcttcagccggatggaagtacttggaggctggtctcatattctagcactttagtgctggtgatgcagattatctctgctccagagtaactctgtgccatggaatccaagaggattctgtcgcaccaggacaggaatgcacccttgtttcatttgcttccatgaaagcagatttcagagattctcagatgctatgagactaattgtcacttagggtaggctccaggggagggacagagaagggcagtgctaataacagggactctggagacaagatcagcaatctaagaaacaaatgtgagacattttacccctccctaatctactccccttttaaaagttcatcttcattttccctttttctaccacgcagtaattgataattaaacacagctctggtttttaccatgcaatctagtagaacacctagacatcaggaactccttatctttggttatttatacaataatgaaatctgtagttcacgctaggctgtgtggacagtatctgcatctctggaaatcaactggaggcctttctcttactcttttccggttgctttccatttccttttccactgtggtccttgcctttcccaagctgaccagaactatgcacaaaaccagtcttcaataaatatcaacactgaagcttcagcaggttgttaactcctgcacagctatcttaaatgctgtatataagtgcaaagttttatggagcctcagaggtctctaagaacactgtaaatatcccaggtttaattagtagtcccggagttaggtaatggcctgtggctttctgcgctaggtctcttgaggtttctagtcttcagaggttgcctgcaactatgatgtgcacatatacagtactctttctcaaatacagcataaaccctctttagactttgctaggcacttacaattattgaacacacatgcagattgattctcattctctcaaagtttgaaaaacaactcagtgcttcaacctaggtctcgttagatattttttgactcaaattgtcgtctgtagttctacttcctaagggaaatgaaaaaacaataaattcccagactggtgttgatgctcattctctttaagcgggtcgactacttgctttgtagatccttgacgggtggggtgcggggtaggagtgcgatccaactctcagcatttccgaatcagctctctcacggtgacaggtcagcccaatcggggctgtaaacagacttgacaggtttgttctgggctgacggccattgactaggttctcagaccagataagtcacttggctgagtccacagtaggtggggcgcgctcaccagctcaggggtagtgactggacgtttgttgcaacatcggagaatgcacgctctgggctgcagcaggagataccctcaagcacagaaccaaaagggttcaccctaagcggcagggcatcagcgatggagaggcccgagagccctagcgcccagctccttttcccacgtttgggaaggcgcagaataggtcgatgtagagcaaggagtgagtctcaggtctcagtcctttggcttgctcttagggtagcaggcgaggagtggcaccagtttggggactctctccccgcgttctgtaagaatcggcggcagccagcaggcggggaggcgggggcacgtgtttggatgtgggtgcttgtgtaaccagttccccaagcgccagccccgacagcgctccttcgggaggctggtccgagcccctgtttccgccgcggcgcaggaagggttggggttccgctgcctgcaccaggcaagagcaccccgagcaaaggaagaagacgacttgcctccggagctatcactggggagtgggaatttggaaagttccccaactagggacacacgtgacctccttcggaaagtagttccgactgtggcccgtgtatccttccacctccttttgaaccctcctaggtctcctcgccccgcccactcgctgggctgcagcttcctaccgttccgtactttccactcaacccggtaaccccaaacgtgcacggtccggccggggcgcgcggagcctggccccgggcgatccatcctgccgggttttcacggcggccaagggggggcggggctaggtggtctctgagaaccgagcttgactccgacgccgcgaaccgacctggagcccgaggggaaagatgctcgactctcttgggggcaccggagcgggcgcaggagaggcctgcggggtgcgtcccactcacagggatcctctttcagttcatttagataggtgccctttgggcccttgaaattcaacggctatgtgttcacgttcagcacgctcggctgagagctttcatttttagggcaaacgagccgagttaccggggaagcgagaggtggggcgctgcaagggagccggatgaggtgatacacgctggcgacacaatagcaggttgctctttgtgctaagactgacaccatgaggacacagatttgggggaagggggaatctctaggcaaaggctgttacagtcaaatctctgcgaacgattgtgatccgacagcggtgcaaaaggaaagagcgaatgcagtccacgccgcggaaatctaggggtagaggcaaggggggagggtattccccttgcagggaccgtccctgcatttccctctacactgagcagcgtggtcacctggtccttttcacctgtgcacaggtaacctcagactcgagtcagtgacactgctcaacgcacccatctcagctttcatcatcagtcctccacccccgccccacaacagcctaccctgcctccggctgggtttctgggcagaggccgaggcttagctcgttatcctcgcctcgcgttgctgcaaaagccgcagcaagtgcagctgcaggctggcggctgggaaccggcccgagcaagccccaggcagctacactgggcatgctcagtagagcctgcggcttggggactctgcgctcgcacccagagctaccgctctgccccctcctaccgccccctgccctgccctgccctcccctcgcccggcgcggtcccgtccgcctctcgctcgcctcccgcctcccctcggtcttccgaggcgcccgggctcccggcgcggcggcggagggggcgggcaggccggcgggcggtgatgtggcgggactctttatgcgctgcggcaggatacgcgctcggcgctgggacgcgactgcgctcagttctctcctctcggaagctgcagccatgatggaagtttgagagttgagccgctgtgaggcgaggccgggctcaggcgagggagatgagagacggcggcggccgcggcccggagcccctctcagcgcctgtgagcagccgcgggggcagcgccctcggggagccggccggcctgcggcggcggcagcggcggcgtttctcgcctcctcttcgtcttttctaaccgtgcagcctcttcctcggcttctcctgaaagggaaggtggaagccgtgggctcgggcgggagccggctgaggcgcggcggcggcggcggcacctcccgctcctggagcgggggggagaagcggcggcggcggcggccgcggcggctgcagctccagggagggggtctgagtcgcctgtcaccatttccagggctgggaacgccggagagttggtctctccccttctactgcctccaacacggcggcggcggcggcggcacatccagggacccgggccggttttaaacctcccgtccgccgccgccgcaccccccgtggcccgggctccggaggccgccggcggaggcagccgttcggaggattattcgtcttctccccattccgctgccgccgctgccaggcctctggctgctgaggagaagcaggcccagtcgctgcaaccatccagcagccgccgcagcagccattacccggctgcggtccagagccaagcggcggcagagcgaggggcatcagctaccgccaagtccagagccatttccatcctgcagaagaagccccgccaccagcagcttctgccatctctctcctcctttttcttcagccacaggctcccagacatgacagccatcatcaaagagatcgttagcagaaacaaaaggagatatcaagaggatggattcgacttagacttgacctgtatccatttctgcggctgctcctctttacctttctgtcactctcttagaacgtgggagtagacggatgcgaaaatgtccgtagtttgggtgactataacatttaaccctggtcaggttgctaggtcatatattttgtgtttcctttctgtgtattcaacctagggtgtgtttggctagacggaactcttgcctggttgcaagtgtcaagccaccgattgctttcttaggctatctatatggtctcttcctgagggctattgtccgttaatacagaatacagtacactgttagtggattagcgagctcggtaatccggtctcctaaatgaacaaaaaagtagacgctttttgaggttgagcatatttcgattaaatcttggcttaggccctagatcaagggtttagatcagaataaaatgaaaattagtgttgcacgtacgcatattgcatcagaatcttgcagtgattgttttagtttcctgagttgcattgatagattcttttaaaatatgactgatttgcataactttagaagcagaatcattttcagtatatatggtgcacattgagggcaaaaagtagttttgttaatgtttaaacttaagttacctacaactttgaactgtatgtagaagttttgtagtttgaagtcaatagtgccataatataccttataaggcgttcttactagatctttgttatatttacctttttctctccctatggggtgatgtaggatagtgcttgaaatttgcacttcagtagcatttaatgttcagtgctcttgtcataaacatagaatggatattgagtagtttctgatcccagatggtaatgtgtaggttcaagggtattgtgtgtagcaagtgaagattgcagaaataaaacttcagttcatgcttgaaatttaagtattgttgtgatgccagaattgctgctcaccgtttttaggtttcaggtcctctgacaccttttggtatcgttaattttactgatttg

SEQ ID NO: 39 - DNA, 6478 bp, Homo Sapiens
tttattttgaagggatgttcaagaaatattgctaaatttaaaagtgttgcagagcaatatgtatcataagaccatactggtataatagcaacaaacagcacccccccacacaatcccaaaaaaatatacagatctatgccaagcaccagttaagatgcctggcacatggtaggtattcaacatttaatgaatacatgtagaggacttttacttttcactttatatcttttggacaagactttgaatttttatgagcatgtattacttaaatctagatttatagggagtgatggaaaatgtgaaaataaaattttaaaaaggaaaagaaagagtaaagatctagatttaaaaaaggaaatgtaaacaagatgaaatagccaaagataggtctccccaaaactaatgttgagacaatgccaccagcagtgacagtcagctaagagatggttcgcagctcactgctcagtactgaggcattcagcaggggttgtatttaactttcaagttggaaccaaccgaaactgttgggcttgaagagctgtctttatgagtcatcgacggcagaaagcacagaagcactaaagaaaataattcagaaatgtggaaagagaaaagtatgcccttgtcttgggagaacaatatttgtgtgtaaccaagtaggaagactttgtggaggaaagtctgaaaaagcagagagctgaagagaaaagagccaaatgaaggacacggtggccaacactcaaagtaaaaagacatttttgaagaagatgtgtttctagggtttctaagaagtcgctatactcatgcccagagccaccttgcaagttcatttggaaagtgcattggtgtcttttggtataagatccacgaacatcaacagtcctgttatgtgagcaggtgttcatactgaagggccacaagcaaagtttccatgtgttattactgttagaacttcccccgctcccttccaacacaaaagcagctctgcctgctagtatggaagccctgggaagagcctcatacttgcctcgtgctgccaacatctctgccttggcttccctgctggaacacacaagtcactcagtactagccatttattcttctggcagaactgtggcaagaggggattaacagggaaaaaaaattaaaaaacaaacaaaaagccaaaacaacatgaaagagctgggcatgtctttaaaacaatcagtgtccacctcccccagccctgtgcctgtgtctgcctgcactttgcatgtctgcccctgtggtggggggggatatgtctgcgcctctgaaaatcttcttatttagacatcacaaggtattagcccaattttgaacacagccggctgcagtacggtgcacagacacgactgctctttcttcagaaaactctccagttcaaacatgtttgcagagcatgattcatggtgtttctttctggattgtccagtgggtaattgctgtacgaaaaccagagaaacagatgtagaccctgaaccctggctataaatttttgttttatgattatgggtttcaaatgtgctgtgtcacactgacaaatatacagttactctgaaacaaaatggattttactctcaaagttttgctttttgtttttcactttttgtttgcttgttggttggaaatacatttattagatcattgatcaaacacaaagaaaatagagatgacacatatcagaatgttattttatgccataacaagaagatatttgggaaagtttcttccaaccctgtggctaatgtttaaaatgggtgtcagtagtttacatttcattacggacaaatcggtctatttttcactttctaccctactcattaatctttatagtgcacggatctgtatttaaagaattatggcttatttatgtatctttccttcattttacttaaaatgaagaatttggagacagaatcaagttttcaagaagtgtaagcatttactgatgaagaaataattagcatgtggctaaatcatgggtctgttttataaattaatacttggattaagtaatagctctaattattgctatcagcataattaattcatgatgaggaatgattaattgactagcgaatattgtcatattataagaaacccatactattcctttcatggggatttaaatactgattattcatttcaaggcccaagttcatttctcagttgagaacttcaaggtaattatatattttacattttcttgcacaaagaaagaaaacatcgagtcgcccaacctttaccacacacagagagagacacactaatgttgttatttttgtgcaatgatacagtatagaggtaagaaattcggaagcagtggtctcgctcaatgaggctgattccatagcttaagaaatgagaatgaacagaattttgaggacacccatccccatcttcacttccctgggaccagtgcatctctactctttggagagatgttaagcaagaatgtgcagcagcctcccctggataacagatccctgtacacacatacctgtcagtgatgccatgtttctcatctctaacttaagtttctcctgctctacttccaatatagctgtttcctcttctcttgtctaacaacttttcatccacctccactgtccggtaaaaatgaactcagtttccaaggaactctaaggaccttaaataagcatttggagccataagcctcatggaccaagtagaaattggcacataatgtagtgctttgtgtatctttacaactaccttaatgacagtgtgttaaatgttttgtaaattcctctgtgttctcttgcttaaaatgtgtgttttctttgtagttaaagggtttcttacaataagtctctgttacaaaatgatggccatataaaagagagaagagaggcgcaaaaataacaaacacagattcagcaaaaatctcacccctttattgccctgaacttttcaatagcaagaactgagcttgctgggctgaaaattgttttaatgtaccttcataaaaggatctttgacttggtaagtgtgtgcgatgcatacttttcatgttacaccacaagtgccacttagcaactccactagacagggcagtgtttcagcatggggtggggtgccccctgacaggcttttaaaaggcccggatgccaatgcacattccaacactatccacaaaaaggagactggagcagtgctcttccctgcattgggcaaggagactctccctccctgcctaaccacttgcctgccctgttttgtgggagaattacaagtaaatgctacagaggcagtggagaaaaaagggtgttttaattcctctccagagtttcctttatttgatgtatgttgcatcctttaaacaagttgtgcaaaatggctgcagggtagattggctctcccttttaaagctctccatccggctgggtttatttgtaaatactgcatctatccttcttagtgttttaggactggctggaaagactcttcttcctgtaggttgggtcagtgtgagagatctaaaaaatcattttcccttaaaattactgtattttaataaaaggattgggcaggggctggaatgagagaaaactggtccttcaaaatgtaaaactgtcatacttaaaccagtttacaaaatatgcgtttaattatgtggtgggatgtgtgtaggtgtatgatgagagaggcaaccaacatggctatttggggtgcaaggatgtgggaacaggcaagtaattttcacattggactttcatcctagggagctgggttctagtcacagctctgagctgtgtgaccttgggtaggtctcatctccccggggttttgtttcaccagttgaacagtatgaggatgagtcacagctaacatttgttccatgatatttacccagcaccatacaagtgttatttctgtcctcccagttaacactgacgtgggtagtattatatgcccattttacagatgaggaaactgaagcctgaagaagttaaatacttatcccagaacacacagctggtaagtggcagacctggaattggaatctagttcagtttgattccccaacccatgctcttgaccactatactgttttttcaagtccagatctgaaatctcattttctgtgtggctgtgtgtttgggacaggggtaaccaattcctgactactctatatgctgcatagaacctggagaggatttttcaaagtaaatgaatctcgaaagctggattgcagagcaaacgagtgcagtcaattcagccaggggcttgcaagagggagaaagagaaaaagactgtggaatggaaagtttcccaacccaagcctttcccaaggggtagccattctctgttctacagtttagggcttgcatgtgctttttctggagtggaaaaatacataagttataaggaatttaacagacagaaaggcgcacagaggaatttaaagtgtgggctggggggcgaggcggtgggcgggaggcgagcgggcgcaggcggaacaccgttttccaagctaagccgccgcaaataaaaaggcgtaaagggagagaagttggtgctcaacgtgagccaggagcagcgtcccggctcctcccctgctcattttaaaagcacttcttgtattgtttttaaggtgagaaataggaaagaaaacgccggcttgtgcgctcgctgcctgcctctctggctgtctgcttttgcagggctgctgggagtttttaagctctgtgagaatcctgggagttggtgatgtcagactagttgggtcatttgaaggttagcagcccgggtagggttcaccgaaagttcactcgcatatattaggcaattcaatctttcattctgtgtgacagaagtagtaggaagtgagctgttcagaggcaggagggtctattctttgccaaaggggggaccagaattcccccatgcgagctgtttgaggactgggatgccgagaacgcgagcgatccgagcagggtttgtctgggcaccgtcggggtaggatccggaacgcattcggaaggctttttgcaagcatttacttggaaggagaacttgggatctttctgggaaccccccgccccggctggattggccgagcaagcctggaaaatggtaaatgatcatttggatcaattacaggcttttagctggcttgtctgtcataattcatgattcggggctgggaaaaagaccaacagcctacgtgccaaaaaaggggcagagtttgatggagttgggtggacttttctatgccatttgcctccacacctagaggataagcacttttgcagacattcagtgcaagggagatcatgtttgactgtatggatgttctgtcagtgagtcctgggcaaatcctggatttctacactgcgagtccgtcttcctgcatgctccaggagaaagctctcaaagcatgcttcagtggattgacccaaaccgaatggcagcatcggcacactgctcaatgtaggtttatttttttcccttcttctaccaagaaaaaaaaaattgtctctcttgcatgcaataaagacgttggaaataaactgcattggtagcaagacaaaggatttaatgatttaatgctgaaggggtgtgatatgctggcatgcatattgattccctttgctgaaaatttcctgttagatgttttcttcccaaataacccctcccgcccccatgctcctctccttaccaaccttatagtctcttgaaaacagtttttaaaatatgcataaaaatgtggggggtggggagtagagggtgaccacaagactttaaaacattcttcaagtagggcaatttgacacattttgcagtttttactaaaatgtatgcagagtggaatttaactttgctgttctttggattagctactagttgtataggtccccccaccccttgtgtattccaacagtccaaagtaattaaaatatgacattttccttgaaaggaatttagtttaattaaggtggctgctgctcccgaagttcataaaccaccagttcaagctgccgcttccaatgttttccttgctaaggaaaggcaatatttcttagcattgaccctgctgccacctttccaagtcactttgttggtctaagaagttgctgttttgctagaaaactactggcaatgaacaccccttggactgagccatccattatttccatatcttgcagttcagcccggaacgtggacatcagttaaaggaaaggaaatataagtggggtagcccaatttaaaaaaaaaatattgactattttgttatctgatgctgacacagtgccgaggtacgcacctggtcaacagtagcctggctgcaggcttgagaaatgatcaggagtcccagaaaatcccaccttcgggtggctgtagtgggagcctgcaggatgcttcgccgccctgacagtgatttagataaatggctcagctatctatcaaaatgtttttagtactttatttg

SEQ ID NO: 40 - DNA, 2534 bp, Homo Sapiens
aggcaggaaagtgggacagccggggagctggaccccaccctctgtgagccccgctggtacctgatggcatgtggcttggagagggcaggtgacctggcgtggagggccagagggtaaatcctcaaacaagtggcaacaggccaccaacttgaaagggaaaattgtgtagtgatgggaaatgtgtccaacaaacctactgggtgactaattacaaaggctgggctggagcttcagaggctgcttgttaaacacttcattaagcggcactctgaaagctgccacctgcgcattctgggagctcagaggggaccctgagggggaatgaggcctggaggatggaaccatcttcaggtagactgagaaggagcctggatctcacttccaaacacagtctggagctcataggtcagaggcctcaatgggagaaaagctaaaggaagagggtgcagaaaggagtttcagggaattggtggctatgtgactttgagcaaatctcacccctctctgagacttagtgttcccatctctatggtcctgtgtgtgtcacagagacatggtggggattaaattcgatcgtgatatgaaagtgcttgggaaactccatggccctacctaaacatgagttatcctcacctgaaccaaggggggaagttacctggcaggattaggaaccccatcctcctgaacctttatgggctctgtcgaggctgaagcagccaggggctaaagccagtccttagcccctggaagggcactgtgaaagtggatctgatttgagaagccgtttcctgatgtgggcagccatgtgatgccagccccgaacaagagggggcagcctggagcctggaaaggtgccagtgcaggtggggcccacgcccagatttctcctgctgactgttctgatgattcacccccacatcccagcctttttacctttactgcagagccggaaagggtgtggggaagagaggagagggaggcaggtcttgggccctggtcccgccccctgctcctccccacccttctctgggcctggccacccagccaaaaggcaggccaagagcaggagagacacagagtccggcattggtcccaggcagcagttagcccgccgcccgcctgtgtgtccccagagccatggagagagccagtctgatccagaaggccaagctggcagagcaggccgaacgctatgaggacatggcagccttcatgaaaggcgccgtggagaagggcgaggagctctcctgcgaagagcgaaacctgctctcagtagcctataagaacgtggtgggcggccagagggctgcctggagggtgctgtccagtattgagcagaaaagcaacgaggagggctcggaggagaaggggcccgaggtgcgtgagtaccgggagaaggtggagactgagctccagggcgtgtgcgacaccgtgctgggcctgctggacagccacctcatcaaggaggccggggacgccgagagccgggtcttctacctgaagatgaagggtgactactaccgctacctggccgaggtggccaccggtgacgacaagaagcgcatcattgactcagcccggtcagcctaccaggaggccatggacatcagcaagaaggagatgccgcccaccaaccccatccgcctgggcctggccctgaacttttccgtcttccactacgagatcgccaacagccccgaggaggccatctctctggccaagaccactttcgacgaggccatggctgatctgcacaccctcagcgaggactcctacaaagacagcaccctcatcatgcagctgctgcgagacaacctgacactgtggacggccgacaacgccggggaagaggggggcgaggctccccaggagccccagagctgagtgttgcccgccaccgccccgccctgccccctccagtcccccaccctgccgagaggactagtatggggtgggaggccccacccttctcccctaggcgctgttcttgctccaaagggctccgtggagagggactggcagagctgaggccacctggggctggggatcccactcttcttgcagctgttgagcgcacctaaccactggtcatgcccccacccctgctctccgcacccgcttcctcccgaccccaggaccaggctacttctcccctcctcttgcctccctcctgcccctgctgcctctgatcgtaggaattgaggagtgtcccgccttgtggctgagaactggacagtggcaggggctggagatgggtgtgtgtgtgtgtgtgtgtgtgtgtgtgtgcgcgcgcgccagtgcaagaccgagactgagggaaagcatgtctgctgggtgtgaccatgtttcctctcaataaagttcccctgtgacactcctcctgtctctcttccagttcttggcgatgggctgggagtgggactggaatctgacttagagaccctgactttggacctctgagttagggccctgaactccctaggtggctcagtggcccgcacgcaagactttgagtccaggtgaggccggggtcc

SEQ ID NO: 41 - DNA, 6558 bp, Homo Sapiens
caagatcataaattgcttctcatcagtggggaaggctccaaacattatgcatctagcataagtaggtgtaaccaaccgtaacggcctgtcctgttactcccgattaacacacaattatcaggttagaactgcattccacaagtctcttgcgttcagttatcctgcatatattaattctcccaagctttgtgctttaaaagaactgtacagtgctgggaagttctttacccattccaatccttagggtaccgagctcgaattcgaatcaggtatcaggcatgctccatcaccacaaaagatgcaaaaagatgcgcacagtggcgcacacctatagccccagttactgaggaggttaatgtgggaggatcacatgaggctgcagtgagctgtgatggtgccactgtactccagccttggcgacagtgagtctatgtctcaaataagtaagtaaacaaaaattaaaaagaatccagtccacagggcatttgaaggcaagaggaaaagatgccagaatcagagatggggagaagatgggcttctggcgcctgctgaggttgagaaatgagacagataggctgagtgtggggtggagagaggatgggcagagagactgaggctggtctgaatggaaatgaaatgttagggctctcagggttatcggggaataattggagcttctaggaaaggtttaacgttgtgaccacctgtgttcgtcatgcctccccaccccttactaattgtgtgaatttggcagactttgagtctcagtgttctcctctgtgaagtggggtcatcttattccaactcctgggattgttgtgtgaattaaatggggtaatgtacggagagcacctgacgcacagcgagtgcttcaaaatttcagtctgcaccccccagcaaaggatatgcacacgcccattgtgagtgacaaatccaggatgacctgaacccaatgtgataacgtgggtcctcgcatgctggtcatgctgccgggagacacttatggatccaattagtacaacaggggaaataaattatttaatgcattttgctaagacagaatacctcagaacttattttgtggggcggggcataataaagggggtccttctgctgaaaacgtttaagctcaggttcgtggcaccactcaaccaaggtcgacagtcacacagtaagccagaggcaatgtcaggacttaaactaaacctgtggcccccacaatgaggccatttctctttcccctgaacggcctggggaaagggggtgggtgggcagaacttggcagtggccaatccctcacttctgtcccctggttttctcctgcccttatctctaggcttgcattgattgattgattgagacagggtcttgctctgtcgtccaggctggagtgcagtggcacgatcatggctcactgcagcctcaaactcctaggctcaagtggtctttccgcctcctatctcccgagtacccatatccctaggcttttaaaatggcttccaggtatctggctgccgtctcagacatccacctgggcttctgggcagggactgtccgggaaacctcatctatgtgaagcaggtgtgggtgtaggaaggccgcttggaaatgaatcagcactgtctcctgtttgagtcgtaagcagggcgccagagggtctggcggacaagaaagggaggatgacaggaggccggcactgcaatgacacgccttagccaccagagggcacgaagcagctgggcaaaatcccgcggggccgctggtggaaaatttctggcacctggagcccggagatggggtggacggaatgtgaggacccagcttcctgaggctgggccggggcagagtcactgctttggatgtccgcagggcctgcttgtgtcttgactactctgcctttgtagacagctggagaatgtgagagtgggattgggatcggactctaggggccattccgtacaactctcctgccctgccgtgggggagggagttgcccaaggttacgcagcaagttagtggcaaatgaatacgattatcaccagtctcaggtatatggccatttgatgggcgcagtcgcagcctcagttcctgagacagagacacctgattaaggacaggccttcaggagctgaccctagtgacccgcggctctgctgctgtctctgtttttctccctggcttttccatctgactgactctttgtcttcttcgtctgcctgcctgtctccgtctctgcccgctggggggtttgctcaactccctcactgggtcctgggagccgcagtttcctgctgtcactcctcagggatttgtagctctctgaagctcttttccgacccgttgtctcggttccactcttgggatccagaggagaggtgattatttcgtagcatagtcagtggtgtgatttcacggggtgagaaggactcccttgctcctaagcactcctccagtgacccctgttgccatgtggtagccgtaagcactggttggcacctggtgtgggcgagacccttacctcatgcagaaatgagtaagaccggtgagctcaccatgtgggggtgaggctgagagaaaacaagtacacaggtgattcagtcaaaatcagaattctctaagtacacacgaaaagggcaaaaggggcgctttgtacaggacagaacaggtagacactgaatccggttgggccctgggaaggctccctgcagtggcctttgaagggggggttggatttcagcaggatagagggcatgggcatgtgtgggcacgttctgaacagaggggtcagcgcaagccgagggtcttggccacactagttgcatgtgccggtgtgtttaagggacacgcagcagcaggccgagtctggagcgcctcactgccaggctttttaaaaatttttaattttaatttaattttattttatttttactttaagttctggcatacatgtgcagaatgtggtttgttacataggtatacatgtgccatggtggtttgctgcacctatcaacccatcatctaggttttaagccccgcatgcatcaggtattagtcctaatgctctccctccccttgcccccatccttctccccgcaactgcccacaggccctggtatgtggtgttcccttccctgtgtccatatgttctcattgttcaactcccacttatgagtgagaacataccgcctggctttaagggacagccatggggatgcactgcagtttctgagcagggaaggccctgtggaggcccttagttaaaaggaaagaatggctgtgaaaatcgatgcattgcgctcccttgtccctcaccctcagtgtgaagggtttttattccgagttctacttgaagtaggcctcgatgggaagacaagtagcatgaggggttcaagtactgaggggagcaagggacactcggtggctgtgccaaggtgtagaagaggacactgggggccccaaggcctgacttcatgtacactgctcaggctggcccccaagtcacacggtgaccgctaggaagggaccagcctgttctcagtctgatcctcctgccatgtcattatccaaagctcctcctggcagggcctgtttggggtctctgtgccagtgctttccctgccaggctgggctggggcttccacctactgctctgggactgctgctgccctggccctgggggaggagggtgtgccgctgagtcactgcctgggcatctgggcctggaacctcgggtgagtcacttagggctgaggtagaggggctgggggaggggaagaagctactcgacagctggagcagggaggggagctggggccacaggaagggcggtgccctgatgcccagacgggccgggatagacaaagggccaaggaggaaggggccctgggagggggcagccctcccttgggctgggctctgaatggccacagtgtttgcctttctccgggtctggggaggacatgtgtgtggggggcagtgagagagggctgtggctgagggctgtgcttcaggcctggattctggcttgggaagctgtccagctggtgttttcagccttgggtagggatgtacccctacccacccacccagccctcaagctggagaagaggaggccaaagttttcctgttcagcctttaactactcgggacttccttatgctccccacagactgtggcccagcccaactgcggctgtgtgtagagcaaccccatttctcactgcttccccatccttccagacaccttcctacacagagggaccttcccaggtatttctaagcacacttagttacctcattacctcattaagaggtattctggtgctggccattaaaagtcactccacttcatccatgccctgaagtcagtcctgtccttctcctcctgatgtcccccagctgcctcctctggcccccagcttcctaagggtggccccaggttgcttctctctcacacacacaggcgcatgtatgtacacgagcactggaccatgaagtctcagcgtgtgctcacagcctctcacacaggagtgggctgtgactcacaggcatgtcatgagaatgaggcctggcaccagtctccaggccccagagcaggggttgcctcccctcaccccggtccaggatgcccagtccccacgacacctcccacttcccactgtggcctgggtgggctcaggggctgcccttgacctggcctagagccctcccccagctggtggtggagctggcactctctgggagggagggggctgggagggaatgagtgggaatggcaagaggccagggtttggtgggatcaggttgaggcaggtttggtttccttaaaatgccaagttgggggccagtggggcccacatataaatcctcaccctgggagcctggctgccttgctctccttcctgggtctgtctctgccacctggtctggtgagtacctctgtcctgctgagggcagggtggggaggatccccgtgggtctctgtctttgtctccacagttctctcattccagcttccctggtgggatcaacctgggcctctctgggccttcccccttggaagaactctctgtgaagtgctgaagtgttgactgaagggttttttttttttttttttttttttgagatggagtctcgctctgtcgcccaggctggagtacagtggtgtgatctcagctcactgcaaactccccctcccaggttcacgccattctcctgcctcagcctcccgagtagctgggactgcaggcgcccaccaccatgcccggctaatttttttgtatttttagtagagatggggtttcaccatgttagccaggatggtctcgatctcctgatctcgtgatccacccatctcggcctcccaaagtgctgggattacaggagtaagccaccgcgcccggccgactgaagggtttttctccaggttcctctgtgaggtctcagtgcaggggttgctctgaggccctcccctggatatctcagtctaggggcccttctttgggggtctaggcctaggagcaggaggtgtgcatgtgggcgttgctgcaaaaagaatcctgagatttttttttttttttttttttttttttgcaaagtcctggattctagcaggactaaggtgcaagaggcaggggtctcaagactctgcctgggtcatggccccaagcagcaaagctctgccccctgcctcggtgaaggcagggctggcatgatgggcccagggcatgccctgcctctggcatagctcctctggcctcaccctgaaacctgcctaacctttccaggctggtctgagtattctcagaggccttgccgctgaggtctgtcccatcctgatcccaaggcaatgaacatttcatatctttaattctaattccaacaggatccttcctggtggagagaatgttaagttgcccccaccctatccatgcccctgtctgcctagaggctcaggggccttcagggtgaggggagacacattccccaccctctgggagctcctagtctgagagaggaaacactcctgcccaagggagcttccagttagatggcagagagagatgcctctggcttcaggagtcccgagtctaaggagggaaacgactccttcagggagcttcctgctcctaggctgtagccatggctcctgccagactgcacaggagcccccatctgccagccggtgcatgtggccctgctccccagagcctgcgcagatgccatcaaaatgggactctggtcaccctgtcatttcccttctggcagacactaaaatggggagccctgccctcaggggggtgtcccaagtgccatcagaggaggcttggtgactcccagacacaagggaagctttagcgtctgccctcagggtgagatggaggtatcgcctccggcctcagggaaccacagtctgagggggagatgcagcccctgccttcccattcagagaggggttttgtgaggtggcttgggggcatagggcagaagtggatcctacaggctgagctaaggccccaagagcctcagcagtgtacccatcacctggcacctctgcagc

SEQ ID NO: 42 - DNA, 1334 bp, Homo Sapiens
aagtgattctcctgacttaacctccagagtagctaggattacaggcacccgcaccatgcctggctaatttttgtattttttttttttgtagagacggggtttcggccatgttggccaggctagtctcaaactcctgactttaagtgatccgcctgctttggcctccaaagtgttgggattacagcgtgagccactgcgccaggcctacaatttcattattaaaaccaattccactgtaaaagaattagcttaggcctagacggaatgggcttcatgagctccttcccttccccctgcaaggtcacggtggccaccccgtgagccactgttgtcaggccaagcctttttccggccatctctcactatgaatcacttctgcagtgagtacagtatttaccctggcgggagggcctctcagatatgagtaggacctggattaaggtcaggttggaggagactcccatgggaaagagggactttctgaatctcagatccctcagccaagatgacctcaccacatgtcgtctctgtctatcagcaaatccttccatgtagcttgaccatgtctaggaaacacctttgataaaaatcagtggagattattgtctcagaggatccccgggcctccttaggcaaatgttatctaacgctctttaagcaaacagagcctgccctataaaatccggggctcgggcggcctctcatccctgactcggggtcgcctttggagcagagaggaggcaatggccaccatggagaacaaggtgatctgcgccctggtcctggtgtccatgctggccctcggcaccctggccgaggcccagacaggtaaggcatgcttcttcctgctctgtggggccacagccagctctggcagcctccgccaggagccactgttttacatacatatttttgagcacctgttttgtgccaggtgctgttctaggcccttaaaagtatatccaatttacaggatcggcaaaagcaggtggagagtaactcagggtggcagggcccccggagaccttcgagaaatgcgacgaggagggggctgccttcagtcggggctgttttcctgtgttaggaagactatacaatcctcccaagtgtcatgtttcaaagaggaagtgttggcgtggggtctcagaatagtgcttttgactgttcatgccaacgtcctccccaggggcagaccctcccagggcccatccagataggcccaaatgccggtcccagtgatggccacctaggagaccctctcccacaggcccgaatgcccatcccagtggtggccaactgggagaccctctcctacaggttcctgggctcccctc

SEQ ID NO: 43 - DNA, 6432 bp, Homo Sapiens
caccacgctcagctaattttcgtatttttagtagagacagggtttcacaatgttggtcaggctggtctcgaaatcctgacctcatgatctgcctgcctcggcctcccaaagtgctggaattacaggcataagccagcatgcccggcccatattctttaactgtatgtacaatttaatttgtagatgatcctaaaagtctaaattggagtcctactgtcttcctcatcttcagcccccataacaaacctcatgatagtttttgtctataagaacccctttgtagttttaccacctgcaaattatttaaccttgcttttccgtgattcctcacccttcacatcccttatatctcttagctattgcctcaaaaattctggataacaaaccaacccaaatttttccttaaacggcatttacttattcttactcagactcatatggattggctagaggtaggcttgagattggctgatggaggtctggcttagattcaatcaggaggttggtccacatctgttccacatgtctctcctcctccctgcatttgctggtctttaagtgccttcaactgaaaataatcagtataccaaagcagcatattttggagtggcatttcctgaaatccttcactggtcaggtggcgaagatcaaccacctgatcaatttgttctagagtgtagaacaagtctggaactagacaggactaagttcaaatctgggctctgtcttttactagctatgtgacctttgtcaaatacttaatctctttaatcctcaaattcttcatttgtaaagggaagattagaatagtactgcaaggacatgctccaaaatttaacaaggattatctttggataatagggttaagaatccttttaaagtctgcctttaaaaaaaaaatctaaatttcctacctataattaacacgtattacccttgtaattttcaaaaagttatttttttcaaaacatactattgatgctttctgtaaacatgtggcataattgcaggttctattaatatctgtgaagaactgcaaacaagagaatggattaggaaaactgatattcttatttttctctctattgaagacaagaaacacacactgaatactgattatctgtagagcacggagtgtggttctacattgaaaaaggaatattttgtgcttttaagggctttacaatcattagggtagaattctaaaaagcaaataaataacaataatgtactccatgttagaatggggcaaacatttttttttaaaaaaaggctaaataaacgaaatgttccctgggttatccctgggaaaggagtgatcacagtaggtgaagcatcacaaaatatttcctggaggaggtagcatcatggatgacccacaaagggtggatgaccctcacaaattaactacagtctcagtgcttattggtttgcttcacaataaaaggaaaattggtcaagagataagagctgagaatgaggctggttaatttataaggagaggaatctccctgttaactgctctagctgacagtaacctcaacagctgcatgtcacaaagctcaggggagtaggaagttcttctctcatcacaactgagaaacccaacgtttaaataaaccacaatttgattcagttcaattgtgtgtgtttgtgtgtgcgtgcagagtttaaaaagctggtaaaatagattgtcagcttttaaaatttctgttcaagttgatatttattgtttttcaactcattaagggcttaaacgttaccttccttgttttttaaaccctgagtcgggctattatttttttgttcccatttgcaaatggcccagttttttacatgtatatattaactgcttatgtgaatacacaaaatattatactaagccaaatatacaactatgtgtgaaaatgatgtcttgattaagggtatcagacatccctttcaacaagaatttcaaaaggaagggcatcatgacaatttttttttctttttcttttatttattttttgtttttgagacagggtctcattctgtcttctaggctgaagtgcagtggcacaatcatggctcactgcagcgttcgtctcctgggctcaagtgattctcccacctcagcctcctgagtagttggcactatagatacatgccaacatgcctggcttttttttttttttttttttttttagtaaagatgaaatctcactatgttgcttaggctggtctcgaactcctgggctcaagtaatcctcccatctagacctcccaaagtgctgggattacaggtgtggaccactgcactcagcctgatgaatttttaaaattatcaaattgcaatatgcatgagtttacacatctattatttttattatgatgattttcaaaaggctagcttgcacttggcaatgctgaattctgattcttctcaatttcacaggagactggagattaaatcagaaatgttaagggcaaacaaaattaaaatcaacattaatgatgtatcatggcaaagaccaccagttaaacattccaccatagatttaaatatctagcctccaacaatgtaaaacatctttgtgataattaaggaaaacaaagcttttggaatctattggacatttatttgccacattgtgttttcaggagaaagaaagtacatgtttgctatctggaggaacttgggcaaatgtaggaaaaaaaaaagaagaagaaagaaacccacatacttctccattcttaagaaaaggaagtagtggtgacatcattctcggctaaaatgtagtctgtttatatctcaaatattcggtaacaatgttttctccagagttatgaagcaactagaacaatcaaatacaattttcttctaaatctttattgcctgattcattcattcatccaacaaatatttattaaacatcgattatgtgtttgatgcttagggacacaatagtaagtggagggaaagatacataatacctgccctcaagaaatttggagttgagtggaggatagaaatataaattaaagaatgacacaaataattataaagttacagctgttaaaagaaaagcatatggtgccaagagaacgtgtaatacaagatctactcatggaggtgagggaaagcttgcccatcaaagaagttatgattcaatccacgaagaccaggagttggctgggtgaagaaaaaaaggtcagaggaaggaagtccacactggggaaggctctaagcataaagggtaggaggattacagaggcatattcacgaaatttggagaaggctttcagtaagcaaggagaagccaaatgaaagtttacgggagagttggaggcttgaagacacgttcaaggatctggtttttatcttctctttatctcaagagcagtgggaagccattaaatgattttaatcagagggttggtataactagttttgtattttgaaaagctgaattcagctctcgtttgagaaactgagtgaaagagcccagaacggccgtggctgagggtgactcgtgggagactcctacacaagccatggcagtggcatgggctggtggcagaagagggaatagggagaagatttggaactcaatcttcctccattgacaaagtcactccagctttggcaaggcaattaattggtgggaaagaagatgcctagccctcctgatttcactgcactttctgcatcttcaacatgagtactgggaagtggcaaaacatccagaggcagcttgggtgctaggtggagcatgagttaaaattccaggatgaagcaaatgaacacttagaatgacaggaaagatttgggagttgggtttgggggagggctatttacctttattccctggagaccctggcacaaacccttgcctctgcaatcttcctctcaggtaaaggaattcattaaatgaattgctagaagatctactgaccagagggctgtacagaatcatatctttgagagtgggaagtaggttgatcacatagtttattatccaatcaggacatatctgaaagagaaagggggttctattaatatttaaactacaaaacatgtacaccaggaatgtcttgggcaaatctggttgccctagcaagaaaggaaatttgaaagtttatactgttctgctcccatgttaccccgtttgcacatgagagggtaagtattctctttcttcacctgcattaagggaataaaagcacaagcattcaggtgactcccaacccacttttaattttacagtttctgctatactctatacattctgaaaattacatttcccaccactatcacttcgtgataggtgatcatttacaattactcactgactcagtcccgggaagaggcggtgcaaaatgggacgctctatccaggtgctcattagaaatgcagaatctctgcctgcctcctagacctactgaattagaatctgcatttttaaataagatttccaggtgatcaatatgtacattaaaacttgagaaaaacctctagacttcgacctaaagaaaaacattttacaacttgacagtgtatgcacatacatacatgcatatagacacaactgaagcacaaatttaatgaagtagaatttaccgttactattttatttgggaaagaaatgtgctcgcgactcaatagattggagtattcactcctggatctcaacttgcaatttgaaaacgcatctctaaagcacctaggagcaatctgaagaaagctgaggggaggcggcagatgttctgatctactagggaaaacgtggacgttttctgttgttactttgtgaactgtgtgcacttagtcattcttgagtaaatacttggagcgaggaactcctgagtggtgtgggagggcggtgaggggcagctgaaagtcggccaaagctctcggaggggctggtctaggaaacatgattggcagctacgagagagctaggggctggacgtcgaggagagggagaaggctctcgggcggagagaggtcctgcccagctgttggcgaggagtttcctgtttcccccgcagcgctgagttgaagttgagtgagtcactcgcgcgcacggagcgacgacacccccgcgcgtgcacccgctcgggacaggagccggactcctgtgcagcttccctcggccgccgggggcctccccgcgcctcgccggcctccaggccccctcctggctggcgagcgggcgccacatctggcccgcacatctgcgctgccggcccggcgcggggtccggagagggcgcggcgcggaggcgcagccaggggtccgggaaggcgccgtccgctgcgctgggggctcggtctatgacgagcagcggggtctgccatgggtcgggggctgctcaggggcctgtggccgctgcacatcgtcctgtggacgcgtatcgccagcacgatcccaccgcacgttcagaagtcgggtgagtggtccccagcccgggctcggcggggcgccgggggtcttcctggggtccccgcctctccgctgcgcttgacagtcgggcccggcaacccggcccccgggcggaaacgaggaaagtttcccccgcgacactcacgcagcccgactcccgtagctgcagggattgtgagtttttcttgaaaaagagaaggaaagttcagttgcaaggggcgcggggcacgtttggtcccctttgtgcgagcaggaaaggcgttgtgttggccgcgttcgaggcgagcccccacccccggaaagggaagtttgagaagttggttatctgaaggcggccggggagcagcggcccggagcggcagcctgagctgccaaagcagccagcgcacctgggccactccgcccatggcgatgccgcgtgcccacccagctctttttgagccacccgttcaaaaggccagctcctcagtccttagctcctggagacggccacgctttccctcaggccggcttcttggcccggagtttttggaaacaagtttcaagaaaataatcgatttccaaaagaaagttagctggctccactgacgccttggcatggatggatagggagtggagatgctcaggtgaaaccgagaatccctcactgaatgcctactgggtgctagaggctgtagattttgcctggaacaagatagtcctgtcttcagggagttgatggttctatgcaattatcgtttgttggaaaccgaagggttaaaatcctaactaggctacccacctgatcgctgtctctgaaggtttttaaggaaaaaataaaaataaaaaaatatatatatatattatatatatataaatatatatataattatatatataaatatatataatattaatatatatatgcatgcaggaatgggggttcttaactatttgttatggaaagtgtaaaacctctgagacttcaaaagttagattttttttttttggagacggagtctcgctct

SEQ ID NO: 44 - DNA, 7309 bp, Homo Sapiens
atgcgatcaatggtgttaactgctctttggactgtccccacagcacaggacaagaccatatcagttccagcaggttccactgaagaaagctcatgtgccttgcagaaacaagacctccagcccagtctaacaggagaccaaccacatgtccatcccattccctcccaaggcatgacagcacctggctgagatgcttgtgtgtattctctgtgtgaagctgagcatgcaaccttcaaagaaaccacaaaggagctactcgtttttaaaggaaaaacacatgaactccacgggcataaggaagacattaaaacagggttggggagaagttcttctccttccatttcatagtacccttcacagaaataattgactgcttgaatatatggtcattgaaacatacatacacacacatacatgcacatgaaaacaagagctggaatatttgactctgctttccatttcccaccaccctagataacacaggatacaacatggctttactgcacacatgtgttttctggcttaaaaacactgagagtagatccctgtggaaagaaatatgaaaacctgaggattcatgcgaatgtagccagaggcgaatgtagccagaggggtcttcaatttgctggcagagctgggggagagctggggcaattttactgccatgaaattggctccagatggaggcaaggaaaggtgtttaccccctgctggtgccagacacagagagatcctgcagtacctcgcatcttaggctcagaattgcccagtgctgggcagcagccccactgagggtctggccagagctcatggggatgggtggaccaggctgtctgttgcttggaaaaggccattttgaatataatgactttcacatggacggtggggcttgggggaaggcatcgtggctagggtctggaggggaagagggaggaaagcaaagaggagcttccctatgaggcaacagaaatgacagtaccttctccaggttgaatttccaaaacccagctctgccctggaagactgggactgtggcatcctctgcagtgttcccagaccgccctaaggcccccaaaccaatgattcacaactatgttgcttccccagagagcatctccccctttggttgacatgtggccagctcaggggtggaggagctccggcagccacgaacccagacgggatgttgactgagagctttgtggccatggcagatgggaggggtgagcttcacccactcaaaggcacccgcaccccaccgatgagtgtggaattgtgctctcccgccctcgcagtgagacgaccgaccaggactgcaggctgagcaaatgggtgttctctggcttatagcgccccctagcaccagccagcgggatagagctccgtgaactctccaaggagccaccacctgcctgtctgaatgctggaaaggggtcggtggtgctgatcattggacccattcaaccaatacttattaaactcgttgttaccaacacttaatccctgtgttctaggggcttagactccagcaagggaaacagatgggtaaataatcacattagagtcagctaagtattgtcaaagaagttgatacagggtgttgtggggatacatgggaggggaatcagaggaggtttcccggaggaggtgacatctaagctgaggtctgaaggatgtggaagagttcagtaactcctgaagaccaaaaaaatggtgataaaaaagacaccttcctaactttttagtgctacgatccaagagacaaacaagcaggtgaacgcataactacactgggctccaccataagccagagcctgtctctcctaggactttggcatcacaatcttctctgaaattctgttttcggcattgattcttgggggaggtagcaatataggaactcagtgttcgttgcgaaactgatggatggtcttcagtcttgggtacgttcccatgtgtcaaacctgtttaaatggcaggacccatctccccttcagaagcattcacttgtcctacaggattccccatggaatcttggagtttttgaggcgagagggatcctggataccactgagttctatctttcatccaataaacacagaagtggacgcctggacaggcaaagtgacttgaccaaggcaggtgcacagctattctgcaacattgggaacaaatctcaggtcttttgattttttgtttccactttactctcttttcatttcccagaaacaaagttttcatgtgcttttttttatagtgatatgtttggaatgcattagctagtaatttaggaagggaaaaaaataaacacacaagagataaacctgtcaggaggacaaacctgtattgcttctgattggctcagagggtgattattatcatggtagagaattatttaatcagtgtaagtaaaatttctctgtgggctgggcactgtacaaagactcaaacgaatctgtctacagatctgaaaagcagatacgagatctgtgaatggctggggtttccaagcccacagtacaagcatgggccacaccttacagcttggaggactgagccctgaaaatgggcaagttccttcacttctctgaaccttatttttcccacatttaaaacaaggatgagtagtttctgaggtcctttttacgacttctcttcctacagactctagcatcctataacttgatacaaagagggtggatatgaactcacctttcctagaaaagttccaggaaagagaataccaggtcatcctagtaggtgtgtagacaggccagatagatcttgaaacttactcagttcttcccagatgtataactctatcattgttcttagctgtcaagagaaagcaggagagcctgcatcttcattctttttttttttttttttttttttggagacggagtctcactccatcacctaggctagagtgcagtggcatgatctcagctcactgcaagctccgcctcccaggttcacgccattctcctgcctcagcctcccaagtaactgggactacaggcgcccaccaccacacctggctaattttttgtgttgttagtacagacggggtttcaccatgttagccaggatggtctcgatctcctgacctcgtgatccgcccaccttggcctctcaaagtgctgggattacaggcgtgagccaccgcacccagcctgcatcttcattcttactgttagcctcaggttcaccccacctagcttattaagtgatgttgaataaccaattcttacatattattaggctcatggacaccatgacatccagactgatgggtgcctgctgaagggggtgaccctagcaggaggactcccctacgcaaggattcatggagtttgctgtttcttttccttagggtgagaaccaaactgccttcacacggtgggcagaggggaactgactcaggtttggaataagagagaacatcccaactgaaaagctcttggaattcgctgaacttcaagacactgtgtggaccagcttaggatagggagtgagaagaaattaaccaaaaggtaatttcgttacttttcagctggaaaaaagatcagattatacttgtgctttcataattaagtagctgctggaaaaaaacgcttcagatgctttctatgagaaaactgctgcttgaagttcagcagaagttatctacttgatacttatattccaggcaaggccttccgttggagaaaatatcggcactttggacaaaactgaaatgtgaaaagaaagggaagagagggcctctatcatgtaagatgcttatccaaagtggatttggtctggaaagtcttctaaaaccttccacatgactgtggaataagtcatgtggggcgcggggataagcgaatctctcaaattccaccacgtatgccctcattcaacctggatccttagagtggcctccagggcactctgctcaggactcagtcagctgttggccacacccatgctctccagtctcctgagaccctatttggttctgagagggctaaaaagcagtgtggctaaatatcccaggcctcaaagtattcctactgtggttggggaagcaatagaatcataccccataaaacaatgaaaacagtgctagaaaaacatcgagagacagaaacatctctacgagttaggccacagttagagtgaaggcagggaaggtttttaaagctgggtggaggggacaagtcaaaaagatgtggaaactggtttccctttcctatggctaaagtgctcaaaggggaaaaaggagtttcaaaaatgttcttggaaataccatctctcacgaattcttcggcctctgctgtcccaatgtcacttgtctgagatgtaaacagaggagttctgagaaagaagctgaacttgcatttctccctgtttctatttgttccaaacttgtggcatttctaacaggatgaagcggaagagaaagggaaagagacaaaagtgtagaaagatggaagatcccagctgcaaatggccatttgcagttagatggaacagctgctgacgttcagggaaatgcatgtctctcttcagatgggaaggagcagtggaaaggggtgacgagttcctggctggccaccaatcatcccatctttctgtgccggttcctcatctggaaagtgggagtgatacttgtgcttgcttttcctacccacaaagattattgtgagagctataatacggtgagatacagaatcctgcttttaaaaatacaaagcagaatcaagatgtcaataataaggatagtaattgtgttagttatctgcaatcatctattatagctagtcgtctaggatcctggatcgttctcctggttttactacagttttggatcagctcacccccaaatcccttgctgaagggtggagctctgtcagccatgggcagggaaccacttcctcttgcctttctactttctgtctttcaaacatgcccagggtctttgcacttgctgttccccctgcctggtacctctctcctgtggcttgccccagagctgatccttgtctttgtccacttctcagcgaggatggcacttcagggagcccttcccttactatcgcagagagagcaggccctccccagtcatgtccaacccagaactctgttttgttttcttcatagccctagcatcacagaaaatcaccctgtgcattcatggatgtccacgggggcaagggctttgtgttgcttaacccagcatcctgaaccgtgtttgttgaatgaatacagaaccccgtttgctctgggagagcacagaaaacagtcttctatcatatatcatagccagctgcaaacagcagatggcttcccatatcccagagagtaagaaccagagagagagagaaagagagagagtttgggtctttctcctctgtgcctgctctctccagagaaactggaggggtagcagttagcattcccccgctggttccaccaagcacagtcaaggtctctaggacatggccacccctcacctgtggaagcggtcctgctggggtgggtgggtgttagttggttctggtttgggtcagagacacccagtggcccaggtgggcgtggggccagggcgcagacgagaaggggcacgagggctccgctccgaggacccagcggcaagcaccggtcccgggcgcgccccagcccacccactcgcgtgcccacggcggcattattccctataaggatctgaacgatccgggggcggccccgccccgttaccccttgcccccggccccgccccctttttggagggccgatgaggtaatgcggctctgccattggtctgagggggcgggccccaacagcccgaggcggggtccccgggggcccagcgctatatcactcggccgcccaggcagcggcgcagagcgggcagcaggcaggcggcgggcgctcagacggcttctcctcctcctcttgctcctccagctcctgctccttcgccgggaggccgcccgccgagtcctgcgccagcgccgaggcagcctcgctgcgccccatcccgtcccgccgggcactcggagggcagcgcgccggaggccaaggttgccccgcacggcccggcgggcgagcgagctcgggctgcagcagccccgccggcggcgcgcacggcaactttggagaggcgagcagcagccccggcagcggcggcagcagcggcaatgaccccttggctcgggctcatcgtgctcctgggcagctggagcctgggggactggggcgccgaggcgtgcacatgctcgcccagccacccccaggacgccttctgcaactccgacatcggtaagcgctcctggtgccccgcccgagccccacgctgcagccaggactgcagcgctgcttagggaggcagggcgagccccactcctttcctctgccccaggagaggggcagacggggttggggcggagtggagaaactcgatgtccttgggcgggggcgctggcatagctgagaggggaagatgccctgcagaggaaactcacagtggctgagggagcccctggccgcctttgctttcctaacttaggtcgtgaggttcctaccggtccttttgacatctggaaaatgtccccattcactactaacggaggaagggctagaagagaagggtggggaaagggttcccaaaacttggaatgctaactaaagtgctgggaaattgaatagttaaaaaaaaaaaaaaaagttgcccgccatgtgcacggaaagttgcaggagaaacttggagtactccgagtctgcatcatctcctgcgcctatgaaattcattcttttcactgagacccaacccagctgcaggcttcccaggcaagcgctaaccgagcttctgggactgccaagtttgggtggatttaagggggaaaatgaggagaaagctgtggcattgacccacgccctggaggcactgtgtttgagagtgttgatagccagcagaaggtgcgaggggtcactcaccacatagctgtgaaaattcacaggaaggctatttttttcccccttgaatgtgtgtggggagggggagaatgggtagtggaaaacagatttgtcaccaaaagaacaaacctgccaagggtcacatcacggtgacagttccagactggacttagtgtcttgagtagagagaccctgtaaagagacctcctactccttagtgtgtatggagggccccgagagcatcctgggaggcttgtctgggagtgtttgggacacttgtgtttggatggctaaaggtggagtggcatctgggaaacatctctctcctcctttccagcccataaag

SEQ ID NO: 45 - DNA, 2501 bp, Homo Sapiens
agctgggactacaggtgcacgccactatgcctggctaattctttcattttttatagagacaggacctcgctatgttgcccaggctggttccaactcctgaactcaagtgatccacctgccttgggctcccaaaatctcgggattacaggcgtatagtgctaggccttcacattcttatatacccttctgtttccttagctgtgaaatggagataatgacatagccttaattcacgtgggatgcttagcacagtgtctggcacttgatagatttttttctttctacttgaaatttatttttgagctgggcacggtggctcacacctgtaatcccagcacttgggaaaaccaaggcaggcagattacctgaggtgaggagttcaagaccagcctggcaaacatggtgaaaccccgtctctactaaaagtacaaaaattacctgggtgtggtggcacacacctgtaatcccagctactccagaggctgaggcacgataatcacttgaactcggcagatggaggttgcagctgagctgagactgagccactgcactccagcctgggtgataaagcgagactgtctaaaaaaaaattatttttaacctaatataaaactctctgaacccttctttttctgagctgcttctccacttgagtccatcccacatcattgaacagttaatcacagaattgtgtaccatcttccttgacccccagatctttagccttctatagtaccctgtctctttttgtcgtactagtcacagttgcactttttttttttttttttttgagacagagtctcattctgtcacccaggctgcagtgcagtagcacaatctcagctcactgcaacctccgcctcccgggttcaagcaattctcctgcctcagcctcctaagtagctgggattacatgcgcgcaccaccacgccaggctaatttttgtatttttagtagagacgaggtttcaccatgttgtcaggctggtctagaactcctgaccttgtgatcagcccacttcagcctcccaaagtactgggattacaggcatgagccactgcacccggccatagttgctattttatttgtgtgattgattaccgtatgacgcttttattgaagtgcagtgaaggcaggaaacatgaccggtttttacaatattttcaacacttatcaccataggtggtacatagtagggccttaataaatatttgtaaaatgaacaaagttaatgagtgtttatgtttgtagttttaattgctctgaagtaaatatctgattttccaatttccaccagagtgctctgcacatagtaggtctaattatttttccctctttactaatcacccatgccttgtaagaattcagttagttgactttttgtactttataagcgtgatgattgggtgttcccgtgtgagatgcgccaccctcgaaccttgttacgacgtcggcacattgcgcgtctgacatgaagaaaaaaaaaattcagttagtccaccaggcacagtggctaaggcctgtaatccctgcactttgagaggccaaggcaggaggatcacttgaacccaggagttcgagaccagcctaggcaacatagcgagactccgtttcaaacaacaaataaaaataattagtcgggcatggtggtgcgcgcctacagtaccaactactcgggaggctgaggcgagacgatcgcttgagccagggaggtcaaggctgcagtgagccaagctcgcgccactgcactccagcccgggcgacagagtgagaccctgtctcaaaaaaaaaaaaaacaccaaaccttagaggggcgaaaaaaaattttatagtggaaatacagtaacgagttggcctagcctcgcctccgttacaacggcctacggtgctggaggatccttctgcgcacgcgcacagcctccggccggctatttccgcgagcgcgttccatcctctaccgagcgcgcgcgaagactacggaggtcgactcgggagcgcgcacgcagctccgccccgcgtccgacccgcggatcccgcggcgtccggcccgggtggtctggatcgcggagggaatgccccggagggcggagaactgggacgaggccgaggtaggcgcggaggaggcaggcgtcgaagagtacggccctgaagaagacggcggggaggagtcgggcgccgaggagtccggcccggaagagtccggcccggaggaactgggcgccgaggaggagatggaggccgggcggccgcggcccgtgctgcgctcggtgaactcgcgcgagccctcccaggtcatcttctgcaatcgcagtccgcgcgtcgtgctgcccgtatggctcaacttcgacggcgagccgcagccctacccaacgctgccgcctggcacgggccgccgcatccacagctaccgaggtacgggcccggcgcttaggcccgacccagcagggacgatagcacggtctgaagcccctctaccgccccggggtccattttgcagacgg

SEQ ID NO: 46 - DNA, 2401 bp, Homo Sapiens
tcatcaaagaaaaaaaagatgacttactagacagttgttaaggcactcacataaaactacacgatagcaggatagatggtaaccaagagggaactcaggacccgtcactaccagctggaaacacctgacctccagcctgcaaatgtgacaagctagaccaacaccagcaggacactgaacacagcttgcagggatgagtctctgcgtcatttctggacatgtgtccaagtaaccagaacaactcaaaatgccaccaggcccttgctgtcattcccataaacctcgaacagtgagttgggtcttcaaggaacctgtctctgtcagcttaccttatgctgcataacaaacaggcccaaagctcttggcagcgtacatcaagcatggaggatctctcactcaccacgacagtcccttcgctggagggctggggttgtactccattttctcttttggaaggggcggcccctgtctgaggtctcatttgtctcacagcagagggatgaaacggcaggaccctggctttgacgggctccatttggcaatggtacatgccaagtgggtcacgtttcactgcccagagcaagttacatggccacgtctgatattgacgtgcgggaaatgcagaatcttcctgcatttggggaggcagatatttggacaacatgcaattcattacagggccagctggatgaagaacggccaagggcccaggctcttcaccccgagccaggccgaaccagccggggccgtgagatcaagccacggtcatcagtgttcgtttggaattatgccttgtccttgccgtgtccacattgtagtagggtttctgttttttaattcatctgaaattggtggtgggtgtggtacacagatgagaaacaggaactctccacgctgggctttaacaggagctgcggtgggaacacaaatggtgcagccactttggaagatagtttggtggctccttacaaaactaaatgtacccttcacatatgatccgccacacaccatccagcaattgtaccccttggtatttgcccagatgagtcaaaaacttgcatccacacaaaaacttgcacgtggatgttgatagcagctttattcataattgcccaaacctggaagccttcaggaggtgagtgggtaaacaaactgtggtgcctccggtcagcggaatattattcagtgctaaaaagaaatgagctcaagtcatggaaagacatgaaagaaccttaagtattattaagtcaaagaagccaatctgaaaaggctgatgctgtatgagttcacatctatgacattatagaaaaggcaaaactacaaagacagtaaaaggatcagtggttgcaggagctagggaggagggagggatgaataggtggggcacagaggatttttagggcagtgaaactaccttgtatgatactgtaatggtggacacaggacagtaagcatttgtcctttatcccgtagaatgtacggcactgagaacggaccctcctgtaacatatggactttcagttataatattgaatccctttcggggttccgtaccgcccgcagcgccctttaactcccgcccccgccccgctcaccgcccccttcccctgctacagcgcgctcgccccgcggccgccaatcagccgcgcgccccggccgcgcgccccgccccgcccccggtgggtgtgcgcgcggccaatgggcggtgcgcgggggccgggccgcggcggggcggggcagcggggcggccgccaatcgccgtggtgttgttgaaactgaaaatactacattatgctaatcgcggccgggcccgcgcgcacgggggtggggcccgcgcgtataaagggggcgcaggcgggctgggcgttccacaggccaagtgcgctgtgctcgaggggtgccggccaggcctgagcgagcgagctagccagcaggcatcgagggggcgcggctgccgtccggacgagacaggcgaacccgacgcagaagagtccaccaccggacagccaggtagccgccgcgtccctcgcacacgcagagtcgggcggcgcggggtctcccttgcgcccggcctccgccctctcctcctctcctttccccttcttctcgctgtcctctcctctctcgctgcccgcgtttgcgcagccccgggccatgtccgacgcgtccctccgcagcacatccacgatggagcgtcttgtcgcccgtgggaccttcccagtactagtgcgcaccagcgcctgccgcagcctcttcgggccggtggaccacgaggagctgagccgcgagctgcaggcccgcctggccgagctgaacgccgaggaccagaaccgctgggattacgacttccagcaggacatgccgctgcggggccctggacgcctgcagtggaccgaagtgg

SEQ ID NO: 47 - DNA, 1508 bp, Homo Sapiens
attctacaattataaacatttagtgtattttgcaaatatggcataacctgttggcataaaattccattgttccagaaaatatcggtaataaaattatagaaaagttaaagatcttcatttcttatttcgaagcgtttgggagacatttcagaaacggatgggaaatgttaaattctgcatgcctgcttatttttctttccacaccgactagatgtaaacgagtgtcaccaaaagtacaccacaggcacccacacagattccttccataagggatccacaaagtttagatgtgaaatgtaccctaaagggttcctagccgtctctcatccctccctctgtgaaacagggaagacacatgtgttttcaagggcagagatggaacttgggccaatgggccggggggtggggggaagttggaagggactgccttaggacatggcaggatagtggattgtttctgccgccttgttgcccataccggggctctctgcaggcgcgtcggctccctccccccctgctgagaagaagccctgccaaaacatccgcctcccccgggaacccccccgtgggttcaaagcgggaaaatgttgcctcaggtttaaaataatctgtccaagccccccagcgcgggagaaacgttcttactcgctctctgcccccgggggtgctccccgccctctgctgccagaaccttggggagtgcctagacccggggcagcacacgtccgggccaaccgcgagcagaacaaacctttggtgggcggccaggaagctccctcccagccaccgcccccctccagtgcctttttttccccccatacaatacaagatcttccttcctcagttcccttaaagcacagcccaaggaaacctcctcacagttttcatccagccacgggccagcatgtctgggggcaaatacgtagactcggaggtaggcatccgtgggggggcgccggctcgggcgtgcggggaagtgtccgcttctgctatctgcctctccaaatatcccgactgctgatctggccccccagccctctttccacttcggagcactcctctggcgttggcaccgctgaagaatgggcctgggcggggaggtgaagagaagccaggaatgttttatgttttcctaatggagagggggcctcgggagcccctgagctaggaggacacggaaaaggggattggggtcctgagattgggtctgttgggcccaagacgcgttttctggatgggtctaggatgctcccctgtcgcgggaaccccgcggtccggccctgcctgctgggggttcgaaaaagtggattgcagggtggaaggtgttatttacccgagtcctggggacagtccccgggactctccgccaagcgcccaaaacggcaggtccccaagcggcgcgcggtgtttttgcactttccaaaattcttgaaacatctcaaaaatccttctgcatcttggcgtctggcagggttttccaaaaaaagtaaacctccctcccaaatgca

SEQ ID NO: 48 - DNA, 1984 bp, Homo Sapiens
  unsure (9, 17..18, 33, 41, 49..50, 52, 54, 62, 80, 84, 127, 157, 159): unknown base
  unsure (175, 207..208, 214, 1181): unknown base
agcttcagncatcactnncatctttatcaatgnccttgggnccacaggnngngnccttctgnccaaacagcagccaatgnaggnatcttaaaaggcacatcactttatatttattcagtggttatgncatcacttaatcctcaccacaaccttgtgngntcagtacaatttgtgntttcattttatctgtgaacaaatggaggcagnnntttgngtaatttacaagtaagtggcagatccgggggctgtgcctagacaatgtggctccagactccttgcccctccctgccttctgctgcatcttgattgagtctagccatctatttctttaacacacactaattgctgtctccatgttccaggccctgtgccagatgctagaaatacatccccatccactggatcttggcatggtccattgctcagtgtcctgctatgttacgtgttacataatgcatttattccggtatttagcccatggaaaataatgctgaaagacattgtatgcatgtttctacaacaaaactatgtaacttatgtttcttttattgctttggctatcaggaagctcttatccaaatcagagcaaatacattagaatttgggcttgtcatttcagtttgctgaacttttccttctggcccagattttctattttggttcataaattctattgcacaaatgtcctttattgtaaaacaccttaaattctttctaagggaaggctgcatggaaatgatacagtaaggtcttccctgcattttcttagattcctattagggaaggcagacctagatgtccctcttaccctcagtcccaaagccccccatttataaaatcccttaagcagtgactactgctgttctgagtacctggaggtagttcagagcttctgaaaggtaaaatccatatacaaaaagaagttccttccgatccagatcccagctttggtgccagatgcacatttgaggagtaggtggctagtcagactctcacctgagcagttaataaaatctattgccccttaatggaattttttctgcaagctcgaattgatctgtcatctttgtgatttgtgagatggcagggaagcaccaaacaccatcatgacttgggccacagtggtgggaaaaaaggaaaaaagaaaaaaaaaatccactgccaagccttgccaggcgtanaaagggctggaactgctggggccattttatctgatttattggaaatagagtggatcttattaacattttaataaagagaatctttttgcactaggctggaagtggccgccagtcccccgtgcaattccattctctggaaaagtggaatcagctggcattgcccagcgtgatttgtgaggctgagccccaacagtccaaagaagcaaatgggatgccacctccgcggggctcgctcctcgcgaggtgctcaccccgtatctgccatgcaaaacgagggagcgttaggaaggaatccgtcttgtaaagccattggtcctggtcatcagcctctacccaatgctttcgtgatgctgctgctgatctatttgggaagttggctggctggcgaggcagagcctctcctcaaagcctggctcccacggaaaatatgctcagtgcagccgcgtgcatgaatgaaaacgccgccgggcgcttctagtcggacaaaatgcagccgagaactccgctcgttctgtgcgttctcctgtcccaggtagggaagaggggctgccgggcgcgctctgcgccccgtttctgcattcggatcgcccggcacgggcagggtgagggggctttcggggggtcggggcctccggtcgcggcggcgaagacagatcggggctcggtagggaggtcattccgagcccagagatcctaggcaccccccacacacaggctcccactctggcgtgcgtgcgtgtgtgtgtgtgtgtgtgtgtgtgtgtgtgtgtgtgtgtgtgtgtgtacgttcgttaacgggagga

SEQ ID NO: 49 - DNA, 17897 bp, Homo Sapiens
acattgcacaactcttcatttatgttcaaagtaaaggatttattacacatcctgaacatagcctacccttcaccctcatttggaattgttttcctttcatggttttttttttttttaattttcattgctcacaacatgatattacaggccaggcatgcttgcagataactgggataatttacttttacttaagtaaaaatcccagatggcagtccctccacctgggatcatgaagcaggtaggatccccttttccctcctaacagagtccaagcagtaagaccgaataagatgggatgaattcaaagagaaacatctgcatttgctcagttcttcaaccaatatttactgaacttctctacggtcaggtgtgcaagatgccaggagggatgagacaagatgatgatgatgatgatgatgatgatgatgatggtgatgatgacagtgaggatgagggtgaacactttaatgagagccttctatatgccagggactgttctaggcactttacatatattaacacatatatttatcacaatgaccctgtattgttatgtgtatcttatacatgaggaggcagaggaaggaaatgaaataacttgcccaagagcatagagtctgcaagtggcaaagataagatagaaataattctccaagagcagagagtggtgacttctggggatagggaagtggaaaagtggggagacaaaggctgttgtttttcctaacaagttttgaagacttatttgaccaggttcaagaaaaacttgataatcactacaaagtaaaaggaagaggagatgaggtgggcctttgggtacagatgcttgttttggaaagtttagggaggaaggggtgagaggaactgggctgcagtacaggaatgggggacttgggaatcagaggggattggttagggtgggtcattgattgcagtgaatgtttacttgttgattgggctgcagtacaggagtggggggcttggaattaagaggggattggtttagggtgggtcattgattgcagtgaatatttacttgttgattagtttgatccagaagaaagggagagatggatgctggaggagagagggggtcccgagggagcccaggactggaggtgggaagacacttttacggacactttttcattttgacagacagaaaagatgatggtctgcagcagtagacccataaattgtgattgaaaggtctgatggtttctctcactcgtttcctccatgcacagagaggtggagtaatttgccccaggtactacagctcataagtggtgaagttggagctgggggccacagaccaccgggttcttctccatgaatccctgctgcatcttggtctctcccaaccccgagtacccatgagttttaagaaagacagttgggaacaggtgattcctatggtcatttttggaacatttggttagaatattctagtataaaatctaagttgttgttaagtagaaatttccagtggacattagtccagaaaatccaatctcatcctgtgacggatttgcagcgcgtgtgcatttactaagcaaatctgattctactgctgaccagcgagaaagaggaataatgtaaacagtcagtgcaattgcacccacattcagctccgtgagcttctgccacctcagctggctgcggtgggggatgtggaggtgcatgcagctcccaggtcccagtgaggggcctctgtatagggtgggcgtcctctatgctttatgtgcatccaggcctgtactaaagacagtctttctcctgcagcgtgacacttagctaagaaaactacttcatctggtgctcagcggaagaaaacatccttttcaacagggaaggaaaattggctgtgttgggctgagggaggggagtgtggaatccaaatggtgtcttcctcaggccttctccaaggtgatgtggactctgattttagaatgccatcacttggaaaattgtgttccattgctcaaattcttgcctcccttctctgctcttttctcttcactccactctccttcctctgtcttctgacctattcaatgctaatggtcttccagaaggttaggcttcccacacaagcccagcctcctgccaggcaacctcctcggggtttcaagctgcaaatctgggctgctcttcgcattctgtcctgaggacctcctcaaagagacaggcaagggcctcccctggcaaaatgcccttctaattccatgcactagttccatttgttactgaagaagtgggccgccttccctgcgcctttgaacttgacattccttatcttgacactccgcacttttgaacttgacactcttgtatctttagcaggtaaaaaaccaaaggtgctcactcaataaatcgccgcaatggggagcctatgggaaaatgggtatgtgtaagctggctaaaggataacaggcacacaggctgcttgatctgggagggtctttagacagcaggatggctcccagagatgcacttttgttgttgctgttgttcatgatcatgtccccagggtctagaatggtgcctgggcatagtaggtccttaatatagttagggaatgaatgagttcatctcaaccacgctgtatggatggagaaactgcgtcttggggctgtaccatgctatgcacctgtagaaaatgtttttgccttttcagtcctttcccagtggcggagtacaggacccagctcataagagcagctcaattctgtcatttgtggaatgacagaataaataagtttcagggcctagggaggcaaggctcctgccttagcctcccaagtagctggaactacagctgcatgccactaagcccacctgattttttattttcttgtagagatgatgtctcattatgttgctcagacttttctggaactcctgggctcaagcaatcctcccacctctgcctctgaagtagctgggactacaggtacttgccaccaggcctggctagctttcatcttttttgtagagatgggacatcactatgttgtgaaggctggtctcaaactcctggactcaagagaggcttctgcattggcctcccaaagtgctgggattacaggtgtaagccactctacctggacacaacattttatttgaaataagaaaaattttccctcactgggaatgctgcagttgaactagttcaaatccataaagaatggaagactgcccagtggtcattcattcacttattaattctagatgttaaattttctagggtgggggaatgtgctcctacattcaaggcattcttgaatgtagccaaactttgtagtttagccaaacttcatagctaatagccaaactttgtagtttagccaaactcttctagcagcaaaacccatgacactggaactctgttcttcacactggtcatttgtaatagaataacagagctttagcactagataggttctgaaagatcattgaatctaatcctctccctttgccagtgagaattctgaagcccagatttgttgatttgtgatcgatagtgtcaaagacaggcctgaaacacagatgtcctgggtcctagaggtgctgtttgcccctctccatatttcttttgttccagaaaacccttctccaaaactggccctaataatcagaggggaaagccatggcccctgccttggggacagcatgggttggcacagaaaagaggtttacaattcagcaggaagtgttgtgcgtgcgcgcgtgtgtgtctgtggaggcgcagggagggtcacctgagcttgccctgggtctggtcctgggctcagtggcaaattcaacgctgggcaggtggcctgaggacaatgacggtgccagctgtgagtcagacttcctttattcataaaatcatgttcctccatgcagtgcttctcaacctggctgcacgtcaggagccacctgggtagctttgtaaaaaccccaatgcccagttggtttgcaccccctgagattctgattaaactgttctggagtccatctctctctttttattatctatctatttatttattttttaatttggcggctcctctgggacttctcatatgcagtaggggttgagaattgctggtttctttggccagatgggaacatgcaggccaatagttacgcacaaacagagcagcagagcaggacggtgctaaggttggaaagggtgagtcatgaaagttcaggaaatcagaataggaaggggtgagaatcctctcatctgggcttgtggggcaggagagaagagcccagtgggcaaggtccagtgagtgtgcttagaactgggaagatgaggggaagggtaagcgctgggcggcggtgggcaagatggacgagattaaacgggagcgaggatttcagcgagagctttggcgacacggaaggctgagaatcggagggagcctgtcgggcgaaagcgaaggcggctgctgggcaggcagccgaatccggctggagagccgagctggtgagacctacaggaagtgaagggagtcgctcagggcgtggcgcaacgagactcttagaagaaactctgaggcagagatggggggcctccgcccatacggagacacaaggaagtccacatgcacacgcacgagcgcgcacatgaacacgcacaagcacacaaacgcctcctccgggcagggcacacgcgcccgctgcacaggccgaggccctggactcggaggggactgcagagccgacccacaacccgggccccgatgcccctcccggccgcgcccctacgactgcttgcgcaacaggcggcggctccagtgggcgcccgccgcgcgctgccggagcccagcccagcccggcgcgcccgggaggagggagcagggagcggggaaggggtgtgtcccggctgcgtgctgggactgcgagggtctgggaggggcgaggcgcgggggcggggccgcggcgcctataaagtcgccctccgcccggacgtaaacaaacctcgcctggctcccagctggtgctgaagctcgtcagttcaccatccgccctcggcttccgcggggcgctgggccgccagcctcggcaccgtcctttcctttctccctcgcgttaggtaagcccgcgccctcttctcccaggcgcgacgcggagcagaaaggggccgcccgtgcggtgccgctggagcgccaggaccgccctttgtagccccgcgtactccaggagtaagcgccccggagctgcaagtgcgcggtcaccccggggcgcgggcgcgagggggctttgggtgcagacaccgctgaagtggggggttcaattacggaaagggaggaaaaaaagacagggtcccattcatctcccccctagctggggattggggttctggaggtcgggaagggggcgatgagacggtccgaaaaaataccaggatagcgtttcctggcgtcgtctccgaatcccagctggcgccgctggcaggggtgcgcgctggacgtgggtgcagaagggactaggtgagtgtgtgtgtgtgtgtgtgtgtgtgtgtgtgtgtgtgtctgtgtctgggaacggagagattgcgcgcgagtgtgtagatgaggggttggtagaggtgagtggcgctggcaaggaggctggagaggggggcgtgggtgtgtctggcttgcagactgggtcgggaacgggtgtggatccgagaggctggtggcgcttcagtcccgtagcacacacagggcggtgtgcatgtgtgagtgtaagcgtgtgtgtggggggagggtccagggtgtgtcacagtgcaacacgcgagccggagcaagtgtctgcgagcgccactgggcagggtgcgcccccggaggaacccgggattggcgcatcggcggcgtgggagaagtgacctgggcgagaggggtctcgcggacatttggcggccccttgagctggctggagctaggagtggcgtcattttcgcctccgcccaccctcccccgctttcctcccctcccctgcctctggtgctggccgctcctgccctccacgggggaaaacagctggaattacttcgacgttcctgggggatccgccgcggtctctgattcagcctcgggaggagatttcgggctgggcttggggaatgcggctggttctgggggaaacacgctgtcacgcctctgtcaaattagtagctggagctgggatttagtgggtcggttccttacccacccctcccccatatcccccgcctgttgtccctgctgtccctgggggtcctgaacagcacgcctctgtggcttggaagtgggagatgcctggcagtgggtgggggaggcagggcccttggttatcttatgcccatccaagaacaccccttcctcacggacgctgggggcacttcagtttgtttggtttctttaagctactgggaaatatctaatattcagaagtcagccagtggccaggcaggagggcggtagacatccttataatacccatcagctgcacgggaccttctcctaagctgcctcaaaagaacatatctaaatacaaaccccctgttcttgctgcagaaatgtagtttcaaggcgaatttttcagtctagactcttcctgttgagaaattctggcgttcttattgagtttcacaaatgtgattgaaataagcaaggtacagagggggcaaaccccagcgcctttcttggaagggctgccttctggtggggaagacacacggctggagacgcagaccggttctgtgtggtgtgtgtggcggcagagccagccccaggctggggtggcacagtgtcggggatgaaggaaggtgtaagggagagagagggttttggtgtggatggaaaactgggtgttcccctgacctgtgacttcttagctttgtgggaccgtgtctcccactgcatctgggcaaggaggaggatttgcctgccctgccctgtaacctggcccctggcccagcgcctggcaggtgggaggagttgaaatatgcacatgggatgaagtggatggctctgggtcttctgccccattctcctgtgaaccagcaggttgagtttcgggcgaggtaatagactgtgcatgggtggaggtgttggcttttgcttttgagggatcctggagtgtctgtttgggtctcttgtgaggaagttcttttggagcaacaaagtttgatcatttggaatggaataaaaaactcacacaggacctacctagtccaacttctttccattttacagatggaaaatgaggcacagggatggggagggatgtgcccaggccgaactgagctggagctcagctttgtgagaggctcctgggtgggactgaaggcagtggaaagggttcctggcaggattttgcctgcctgctatggaggggcgaaaggaaattgcatcttcattgaatttctggtgaggaaacttttgaggccaaaggggcagagcggaatgattttttttaagtgtaaatcaggtgttcttgagagattagcaaagccagcctgaagggcaggggcttagaggctgcagccccctgagttggcctttgactgaatggggctgccccccccccatgacagaagacagatctcaactgagctgagggcccccctgggttacgttgaaatccgctggcctgaacttgcctcctcatggacctgaaagaaagatagcattgtgtttttcgggtggcccaaagctgcagttcttccttgggacccaaccccagagaatcccattccagatgtgactcagaggccttgtcctgggagagaaagcgtgatgactcagcatctgagactcaagcagggttcaggtttgactcagcctggaaggaaggccagggagggacacgacatctctctccctccagagcagccactgtctccctccatctgccttcatcctcgcaagaacgttgcctggatcgtattgctccattgaatggatgaggcaactgaggccaggagagtttcaggatttgcctgttgccatatggctcaggtgggagagccagactttgaacccggacagttggacttcagagcctttgttttttttccatgacaacatgttggggcgcctgaagaaatcaggctcaaatgaaaaggcagtcaggagctccatgcctcagtttgcttttctgtaaaatgagagtaacagacatgatgccatcagaatgtgtaaatattaatctgtgtaacctgagaacagcactgagcatgtggaaaacagcgtgtaggtgtttgccgtcagtagcacccgcagaagacattctcaaggcatcttcttggcaggcagagtctgggaccctttgtcctaaacctacccaaggctgtgaaagtgcctgcaaatgcttgacctaggtattgctttttgctaagcttatgtaggttgcataatagtgtcatgaaaatcttgtctgaaatgcacatttccaggcccggtctcctgcgattctctctccatcaggggatatgctgttgtttcaaagctcctttggctgggttgggaatggggtatcctgcaggcagacagagttgagaacctctgctctggaatgacaggggagagaagaaggaaggtgtagtcatacatgccgctgtaccttcaggccaccctgtgtccacagtgccagggaattagtgagtgctcagtaaatagctcttgtttgctatagtgccttggaggttcaatgcatcacatcagctaactgaggtagaagacattctttccacctctcaggtcagaaaattgaggctcaggctggtgactcttctgtccagagtccagtgagtggggttctgcccaaggtgagcctcctgagccctttccaccctccaacattgcgcttggaggccacccacaccctctgggcccaccttttgagaaggagcttgtttcctggatccaccccaggctgttgttcctgcctcccttgatggctgtgtgatggaagtaccgcgtgtccacttgctttttatctttcaacttggagatagaggcaggctagatagcggtcttggctgagaacttagcccaggcaggtaggcagaagggctggggacactgaggccccacaggaaggcggctgcagaggtagagggccatgagtaggtgccaacctggagccgtgttctcggggtgggggccatgtgaaaagaaacctgggctccctcgggtggggcgtaagccccagcactacagaatgggaatggattacacaatcggggccataagcaggtctctttgacccagatctttgactttcccacctaacattgtttgcagacctgcctatgccctacctgcctgggctccatctctgaccttttgagtccagcgggttttcttgcaactgagctggtagaaagtgaggctccttaacagtctgggggccttgagtgccctccccagcagtttaatctttcctttctttaaatctgtggggagactttctgcagctatacattttaaatctgcatagagttctgtttgaagagaggtgggtgggggcccaggtctccaccttgttctcctgccttcaccctctgccccacccccacggaacctaagaagattccaagtaaccctcttcaaatatggatgtgagagggccatttaagaggtgggtctatggcctctctcagctgggaatgcttaccatctctccttcctcctttttaatcatggaactctcctcctttctccagaaaggcctccttggctgtcctctgctggaggggaggctgggttgggtccttcctgggacctgtccatgtctcccatgaaacctgagagcctgtccttagtaggtgttgtgttagtggtggtggaaaggacatctccactgattaaggaagtaacttggaccatcttgcatagacaagatcggaggcccattccggagggtggaaactgcaagaccattctggggaaggatcctgttagcgtggctagcatcccatctcgggacaaagggttctgtatgaggaagccatttcctcgtcctctgctaacactggctccgtttgtgtgatttccacaaattatctcagaccatccagcgcagctcatgcctgtcttgcaatttcacaaaataatcctctaaggagaccagtgtcctcctttggacttccagttattcacctcgtcccctcagacggtcgtcttctgtctgccaaacaaattactcgtgctgccaaaactccactgagaatctccaggaagatctcggttgtattgcagaaaagaggtgggccctgacgagattcctgacacctccctcttcctgctgttgtgtttgggacactcttgctgacctccctggtgctgtgctcaagttgaacacacagcagttcagtttcagctccagcccctctggacccacacccagggagtgaatgcggctttggcttgtttgagagggagacagtggggttcaccttcttagtgatccctttttcattccttgaatatcaaacatcactgatgcctcctgggtttcaggctccactgcaaagtacaggggccctcgaggagttcctactgtggttttgttctctgacatttgtactgtttccttgattctgattgctctgatacagttccctaacctctaaactagggaactttcttgaaggtccagtgaatccacccatattgtttgctgagttgattagttaagaaagacagttcgtgaagactgccaacttcctcaccctccccagggccttgagtttcagaagggccagaaaacaccaagagagcccatgaactgctttgtagcttgacttcaaaatctctttgggcaaagaaatgacaaaggattgtatccacagtaaggcagggctatccagggcctatctcaaggtggttttccttgaggttcaggcagaaatggtgctgttctcggcaattttctggggaagttgctacagcaaacagccacagcacatgttgattttttccctccttttaaaaatctgttctataaagagcacaatgtgctggagagaacactggctttcatgtggccttaaaaccaggcatgttacagagggtggaatctgggccagttgctgttggtgacaatcgatgctacccttgtcagcaattcccgcctgctctccctttatctgcttcactgaaggcctccaggggactgttgtccgccctcccccgagggaatgagtgccacacctgcacccacaacaaaccagtgagtttttcacctttccctcagtagggaggaatctagacatgtggcctttggaagtcaagtgggcctttgtgtttgtttttgagcctcaggttacccatttgtgaactgggtataatacccagcctctcccggggcaacctccttgaggagcaagtgaaacagtgtgctgagtgaatgcttttccaaagcattgagttggccgtcttaggaaggtactatgggggagctgaaaacagagaaccttctgggtgttgtgaagggagaaaagttcaagatgctggttttgccaaaagctcaagcctgctcatgatggctcagtggtgactgcagggtggaggagaggcatgtgactgtcccagctgacctccacacgctgaaagcctcatggtcacgtgcagcccaccttacaacgttgtatctgggccacgggtggtggtgaggactgtggatatatttagggcaatgtgagatcattgtcaacattccctttaaggttgctttaaccttaaagcagccagcttgatgcttgctgacttggggcacacatcttaacctcttgatgcctcagtttccccgtctgttaaatggtgacatgctggcacctccctcctagggtttctgtgaggcttaaaggaagtaccgggtttagagtccagttagtgccacagatactgttcctggtgctgtttttgtggtgtgtctgtgtagggttacattgttgccttcctgtggctgctcttcctggtgggcggaacctggaacttctagaacagatcatggatgtttctctgctggataccccttcagcctcaccctgtgggagttgtggcggggcccaggagagtttgctcaagagggtgtgcaggtgggtggcagagctggagcaaggcactagtcttaacagacaggagtctgaggctggcagaagtgggggccttggtccaaggtgcggggctaatctggccagagctgagcctggcagggccttggtaagaccctgtggcccttttgtcttggtgaagcaccttcctgcctgggtttccatttgcctgtaagtttgttgtggacagcgtgatctccatagacgtacactgtgcctactttacagatggagaaaccaaggcccagagaggaagtgacttgctcagagtcatggaataggaaagtggcagggtccccatgccctgattcctaggccagcgttcctgctgccccactgaggtttttgggaatcacaggctctgtgtgtccccctcagtcccccaggggctgttgaacagttctcaagtggtgtcggattactgaagatgcctctgcccactgccctcccaggtcccagggtcacgggtcacgttcttttcttcctcgggcagatcctggccttggctttgcctggcacctgtgatccagctctcctctgactctcctgggtctgctggactggaagggtatttgtgtagcccctcttgggccctcattactcattgacagacagtgctggtggagagaagggccccagtggtgacgcactgggcctgataatcagaaaccttggtggcatttgctgagcattttccatgtgtccctctcctcgctgggactctaggactgaaacccaggccacatcctcacagatgtcctggcatctccaaggcaaccctgaaaggaaagtatgttgatgaattaagcaactgtttgcttaattctccatgccattcttgaatttaagccccactgctgatcattgggagcaggagttagcatgcccattgacagacaagcaaactgaggcaaagaggttagatagccaggcatggtggcatatgcctgtaatctcagctactcaggaggccggagtaggaggatcacttgaacccaggagtttgagaccagtctgggcaacatagcaagaccctgtctctctaaaaaacaagatgaataatacatttttaaaaagagattcgataaattatgcaggatcacagagctaataaatggtgacaccatggcctgcaagccttcccccagctcctggctacctttcgcttctctggcattggtcttctcggaattcctcccaggcaggtggatgggaaaagaagtgaagatacaggctggcagctggtgctgtgacctggagccctgtttttggtgctaagctgggttttagctgaaggagacctgctggaggggtttcttctgtgcttcttggggagcaaagatggccttggagatggagacacggtttgtcagtcccaagccactccaaaggtggggctggtgggctaggagtcagccctggttcccccgccatgctgtgtgtggccctgccttgccaccccacctgctggaggacctctttgatgctttctagtgggtcccaacattctgtgattaggactttgcatgaggcagagggagggcaggagctggagtccagcaaggacctcaagcccagggacaggctccacctgccacacttgctaagccgtgagggcctcaggtgcccgggaggagggagcaggagtggaagcaccagctcgagccgccaaaccaggtcacgtatcacctgccatttcctgctggcagaaggagatcacagacaccagaagacagcagcttctgccagaactgggtccttccatgattctcaggtggtgactttgaatcccagaaaaagtgttttggggagagtggagtgaaggaagagtgtgaacattggatctgactccactccagcccctgtgctgcagccagcagggtgagctcaggacagctggcagccgcttgggcccagccccctcctccgtgaatgaaggtggtggggagtgcacgtgtgcgtgtgagtgcgtgtgagtataaatgactgtggatgtgagagtccatgaaagtgagaatgtatcagtgtgtaagaaagtgtgagtatgtgagaatgagtgtgtttgtgagaatgtatgtatgtgtgagtataagtgtgtgaatgtgagaatgtctgagtgtgagaatgaaagtttgcaagtgtgtcagtgtgagggaatgtgtgagtgcatttgagagtgtgtgtgtgtgtgtgtgcgtgtgtgcacgcatgcactagattaaataagaatgcatccaactgacattttctggatactgttacctactaggaattactaaaatcagctattccagaggagggtggatgtcgcaccaggggacatttggcaacgtttgcagattcttttgctggtcgcagcgtggggtgtatgctgtgggcatgtggtgggcagaggccagggatgctgctgagcctcctcccgtgctcagggcagcccctaaggcagaggctgcttgtggggcccaaatgtcagcagtgctgagctgaggatctctgtccaggaggcacagacgctgtcctggatgctgtccagacagcatctgctctgccctccagggggacagacagacagtggacacagcccagatgcagcctgatgagtgagcccaagggagtgcctgtcccctcgggactgtgagctccgtgggggcaggaactgggtctgtttgctcatgatccccagatgagtcccatagccagtctcatcaccatagctggtgttatttttgttctgagctctgtgttgggcacatagaacctagtgggtagaaacctctgaataaatcctgagttttccatcctgcttccgtgaactcagatgttctttgagggccagcctggtggcgtgggggctgggagtgggcagattgtagggagccaagtcctggggtggagtggggttcaggcccctttccctggcttgagccgaagcaccttggctttttaaattttaaaatttttattttttaacatttttatatgttgaacttccttacatgatttcctttggataaaagctcctgcaaaaaaagtttgaaaagttttttggttgaggcatcagggacaaggtaagggctgcttgatgggcccaactcgggagaactgaggtgagggagccgctctcctcccaccctacaggctggccagatggtggaccgccagcagctggctgggtcaacctgcagagagcaccttctgcagtccttggttcatgcggccttagtattgcaggacgcgaccaacatgcaggctaccccgaggcctgcagcccccacagtccccccagactagtgcaaagctttatccagtctcccggcagacttcagagtctaggacacttcctaaatggttcaaaatcaatggaatcatttgggggacaataaataatgtcactagacattgccaaatgtcccctgggagagaaaatcccccctagtttagatataccccgtgatcatcctcagcagttttatctctggacttcccaaaggcctttagcagtgagggggctgggtcagagaaggccccaccagctcccaaaagcagatgctcaagaacttgatatttctaggacacacagcgatttttttaacccattgcctcatgtggtctgggaagctaagctgtaggaataaaaaaggtgccgggtagggtaaagaggtttcaccagatagaggaaacggggaaggtggacatttctgtcttttctgttctggagaacgagagagctggtggagactgacagacactatgtcctaatgtgatcacggtttctggaagccaaagagaactgaccaaactgggctgaaccacagcatttctcgagtccttttaaatgtagaatttgttttccagacattgcactcttggggtttagcaatgatttaaaagtgaattttactgaaagcatgctgttgagctacattgctcatttattcagagagggagttgcagcctgactttctgcctaggagagtctctcgtgctgggagctagaggtagagaaaagaacaagctacctgcttgatgaagctcacagataggactgcttgaacccacctggtgggacagtgagagccccctgacttcaccctggcgcgctttgctgagcagggtatgctaagaagctcctgtgaaatgagaagtcctttcactcccagaatgaggggtggcgttggcagggccctgggtttctggaaggctccctaggccatgtaggcgaggtgtcccacaggccagggtcttgggaccacgaacctgctgaattagcaaggctaacagacgcgggcctttcatgcctcctgcctccaagctggcagctgcccaggaatgctcacaaatataaaaccgactttgttttcagaatgttctggagcatagactccaaagtctgtataaagccattcttgtggggctggttatctactggggaaaatcatgctggggccccagaccagagcaccccagtggagagcaggatctgcccacggaatgccatgtgttggcacaagggatggacccggggtggattcggggtggcccgcacttgccggctgacctctaagaggtgtttcaccaggttcttgggagttcctgggtcttcagaggagccctaggcaggaatttcagaggcttgcattctctcgaccattgcatccgaggggccttgggcagtgcggggcccaggttcccactctgaagctggctgtgtgagggctttggtcaggcgttttccattcagaaagtctggatctgtgaactgggtgggtggcctgggctcttccctcttgtcacttacttcttctccgccggtcctctgctgctgtctgtaagacttgaccttattctgcattttttatgcttcaccccagggattgatgggcatttagtttttctaacttgactactgatctagaagaatacatgcttatacttctggtttctagattcagctcttggaggcatgcttaatagatagcaccacctgcccaagccttgcaccccagggagtcagtggcagcattccaagtcttcctgggctgtgcttcagtctggttttgcagcccacacttctgcacctgccctgtgttagagcacaggtaacccctctggtccatcccctgctttgatccaggaagtgctttctgccttggaggtcttttttcttacaaaattgtactgtgcgttcaaatgcctgccaaactccttgacttaaggttttcctctgcccctcttcccttttagcaggcagccgagagtcctgcaccgtggggtgtgtatgtgtgttcacgcgcatgcgtgtgcctgtgtgtctgtgcgtctgcatcaccaaccttctgttagggctaactgtgaggctgaagcttgcactatgcctatacgtggtaagcatcgtgtgagcttgtgttcccctttcattgtcacacgggggctgcctgactttgggatcagcaatgcaggtccccttctagaatgcagtgagctgcatcctgggtatggtgggtgggcctgaacttggtatggggacctgtttgtgaggctgatctatccatttcattgggagggtggtgtctgtgagcctcagtatcctctcccaggaaatccactgcgctggccccaatgggaagactgggttgggtccatgggctgtgtgtacaagggacctcctcatcccctgcagtgcatcacgagggaggtgaagctgctgggcagagcgcaggcctggccttcttgccattggtcttggatttgcttcctttaggaaacctctcagcaggaagtgttgaccttttggcctttgtctccttgcagg

SEQ ID NO: 50 - DNA, 5987 bp, Homo Sapiens
tttctaacctgtatcatttttcttatctcaataacttcttttaacatttctcacaaagcagatctactggccacagaatgcctcaattttcatttgtctgagaaaaccttatttctccttcacttttgaaagataattttgtagggtacagaattctaggttgtaggttttttcccctcaaagtgaaatatttcattccactcttttcttctttgtatggtatctgagaagaagtcagatgtaattcttatcattattacttaaaagattgcttctgttcctttctctcttctccttcccttctttccttctctgtatattacaccttttatagttgccccatatttcttagatattatgttttggttttcttctgtgtttttttctttgattctcagttttagaagtctctatttatatatctgcaatcgcagggattctttcctctgccatgtccagtctactaataagcccttacagacattgttgacttctgttccagtgtttttgatctctagcatttctctgattatttcttggaattgccatctgtctacttacattaccaacctattcttgtgtgttgtcttatcatagtaattgcagttgttttaatttcataggtattgtaatttcaacatctctaccatatttgacattgattctgatgcttgctctgtcttatcaagctatgtttttgtcttttagtgtgacttctaattttttgttgaaagccaggcatgatgtactgagtgaaagaaactcaatacattgtaatgtgacgataagagttcaggggaagtgaagcattctatagtcctatagcaggtctcggccttttagtgagcctgtgcctatgaacggtgactttcaacaagtgcttttcattccactcttttcctgtccttaagtgggacaagatcactgggggggggctagaattgggtatttcccttctccaatgtagaagctaaagagagggctggagttgggtatttttcttcccctgtatggaaagctagaggcagttaaatttggatattttccttcttctaattcagttaggctgcgacaaaaatcccgacagtttaggctctaatattataaaataatttctcttgagtataggccttattaagaacactatactctgatggagctgagggggagttttctctgatattcactgcgagaacctcgtagagctccaggaagcaaaactcacaaaagtgtgggagtcttccagaatttttcctttgcagacttatctgcactgaacctccagaaattcatcaattacagttcaggttttcctacccaggtactggttttcatggaggtttctgcctgtgcatttctgctccagtaagttgttcttcttgtatggtctgtctttcaaattttttaagtagggttatgacctgtcgcctcacttctctgacagttctgagagtgttgatttttcagtttgcttagatttttacttgtttttaggatgaagtgacaatttccaagctcctccctgacatgccagatcagaaactgaaagtcctaagcctcatattctgtgcgtgggtatgttcacatcctgcctgctccagtgcccccacctcacactctctttcccttccttgtccccttgtgagatttctaggtccaatacaaagactgtgttcaactcattcaactactttggctcatctgagtattataatgaacaatcacaaaaaaaaatgaagtaaaagaaaaatccatcaaagaattgagatatttgagaaaaagaaaggagatcagtgttttataaaacttagaaatagattttttaagtgtttcttcattgacttatgtgaaaggacttttcttaatttaacaaattatgtgctttcgtttatagcctcaaaacttcttgtgtagctaagaatgggtaaataatcaggctttactaaaggactaacgtaaagatcttctgtaagtaacatttctgctactcaaggaagagataaacttcatggcataaccttgccaaagtatactaagaataaccctgacacaaagctcttttttcagccaacatgccatgaaagaaagaagacaaggggtgatctccactctctaagtgaaccactaaacccaccaaagaagaaacgagggaaatagaaagaggacccttgcctgagataatggatctgtatgtatgagtagtagaaccctgctcaaagtacaaggaagggaaaaaaaagttagtttatttggaattttggacattaagagtctttattgttcattttcttttaactcacatgaatggcttatcacttcaattaataaatatttcatttcttttcaacatattcatgaaacaaatctgaaatgaacagtgcaacatgtgaatgtttagaacattataaaattaaacacaaaatctgtctggcaatcttcctagcatcttaggaaaaaagttgacaaaatttcaagcagcagaagggggcagtaaaactcaacagaaagctctggaagatttttaagattcttccttattttcttttcatgtagattatttcccaacaaatttcagacgctaatagaaattttgtacaacagatccatatatttgcctaaaatagacacagaaacattgaatatatgcaaacatgagagctataagttttacatgatcaaaccttttttttatggtacacaatagtcacagtacttttccatataaaacaggtttagtggtcttaatttagtttggcacatttaatacactcccatgaccagcatcccaaatgtacctatccgttttattttattgtctcagaattgtcagttatttaataaattatgtaacttttttccttatgctcagatttgcacttctttctaaaactctgcccatccttaaagtcccagattctccttgaacttttttttttgactttccaagtacatggaactcttcactctatcctgctatataagtgacagaatttccactatgggatagatggagttcaattcctttgagtttaaaataatctaaatataattattccttatgccctgtttttccctcacttttgtatccaaatctcttttcagacaacagaacaattaatgtctgataaggaagacaatgatgatgatcacttcaaaatgaattcaggattgtaatgtaaaattttagtactctctcacagtatggattctaacatggcttctaacccaaactaacattagtagctctaactataaacttcaaatttcagtagatgcaacctactcctttaaaatgaaacagaagattgaaattattaaattatcaaaaagaaaatgatccacgctcttagttgaaatttcatgtaagattccatgcaataaataggagtgccataaatggaatgatgaaatatgactagaggaggagaaaggcttcctagatgagatggaattttagtcatccgtgtctcatgaagaatcagatgtgtacactaagcaaaacagttaaaaaaaaaacctccaagtgagtctcttatttatttttttcttataagacttctacaaattgaggtacctggtgtagttttatttcaggttttatgctgtcattttcctgtaatgctaaggacttaggacataactgaattttctattttccacttcttttctggtgtgtgtgtatatatatatgtatatatacacacacacatatacatatatatattttttagtatctcaccctcacatgctcctccctgagcactacccatgatagatgttaaacaaaagcaaagatgaaattccaactgtcaaaatctcccttccatctaattaattcctcatccaactatgttccaaaacgagaatagaaaattagccccaataagcccaggcaactgaaaagtaaatgctatgttgtactttgatccatggtcacaactcataatcttggaaaagtggacagaaaagacaaaagagtgaactttaaaactcgaatttattttaccagtatctcctatgaagggctagtaaccaaaataatccacgcatcagggagagaaatgccttaaggcatacgttttggacatttagcgtccctgcaaattctggccatcgccgcttcctttgtccatcagaaggcaggaaactttatattggtgacccgtggagctcacattaactatttacagggtaactgcttaggaccagtattatgaggagaatttacctttcccgcctctctttccaagaaacaaggagggggtgaaggtacggagaacagtatttcttctgttgaaagcaacttagctacaaagataaattacagctatgtacactgaaggtagctatttcattccacaaaataagagttttttaaaaagctatgtatgtatgtgctgcatatagagcagatatacagcctattaagcgtcgtcactaaaacataaaacatgtcagcctttcttaaccttactcgccccagtctgtcccgacgtgacttcctcgaccctctaaagacgtacagaccagacacggcggcggcggcgggagaggggattccctgcgcccccggacctcagggccgctcagattcctggagaggaagccaagtgtccttctgccctcccccggtatcccatccaaggcgatcagtccagaactggctctcggaagcgctcgggcaaagactgcgaagaagaaaagacatctggcggaaacctgtgcgcctggggcggtggaactcggggaggagagggagggatcagacaggagagtggggactaccccctctgctcccaaattggggcagcttcctgggtttccgattttctcatttccgtgggtaaaaaaccctgcccccaccgggcttacgcaatttttttaaggggagaggagggaaaaatttgtggggggtacgaaaaggcggaaagaaacagtcatttcgtcacatgggcttggttttcagtcttataaaaaggaaggttctctcggttagcgaccaattgtcatacgacttgcagtgagcgtcaggagcacgtccaggaactcctcagcagcgcctccttcagctccacagccagacgccctcagacagcaaagcctacccccgcgccgcgccctgcccgccgctgcgatgctcgcccgcgccctgctgctgtgcgcggtcctggcgctcagccatacaggtgagtacctggcgccgcgcaccggggactccggttccacgcacccgggcagagtttccgctctgacctcctgggtctatcccagtactccgacttctctccgaatagagaagctacgtgacttgggaaagagcttggaccgctagagttcgaaagaactccgtggatattccagctttcccacaagcactgatcattatgagccagttacttaaccgatctgagacactctcacctcctaaatagggatagatgatactaatttgcaggttgtcattatgataagacaggatctgatcaatatatgtgaattgtttatatttggaacctttttattgagtggaagaagttgttttaaatattctagtcagttctttcctgctcccaggaaagcccggattatgttttaagataagcaaaatgtcttaaaagtaagctgttttactttgaatttttccctaaatgttgattagtgtactagatccattttaatttggaaagtgaagtgctacttatttgaacttcttaaaaatgctaattttaacatctaaagagttaactaagaaaagcttagtaacatgatgtaccaagttgaatatgctgttatccttatttagaatagaaaattggtatttctacgttttatccattctaaggcaggttaaaaaattgtatttccatgactacctatatatttcttgaatttattattgtaaagttgattcatagtcaaacaattaaatgtttaaattaagattaagacactagagaatgatttatttgctgtcctttaattgcagc

SEQ ID NO: 51 - DNA, 5683 bp, Homo Sapiens
atggcaaacacttgaaaaagcttccacgctgaaacccaaaccagaccatatttaggatgccccataaggtggcattttttactaagatgataaaggataaacattggtggagccagagaggctgctcccaaatacagtcctccccatcagcaacactgcagtagcctgcacctatcgtccagagtatgaaaaagacttttgccaaagacggcttttggggatttatcattattacatgttaagagcctgttctccatgtcctcaccttcctaccttgctaatcttccccatttccatctttcggcccagtgtgagacctcaccatctccttttcccatcttctttcctccatacccttggtttcctagcaggtcaatgcccctgccccttcactggaatccatccatcctggttattcttttctttatgaacctgctggactacatctcaaagttacccaaaagagggatacaaagacacaataaaatcggaaataacgctcacccttaccagcctgcagttaagagtgtgtggaactagggtggctgcaggcaaagagatagggggaagggctgcctcatgccatgggcaggacagtaaatggtgcaaattttctggaaagcatcttagtaatataggtgaagagcctttacaatgtgtttatcctatgacctatccttacttctcttattctaaaggaataagaagaggtttaatcaaagcatgagtgaaaaggccatccaaacacagggaaaggggccgttatgatgtctacggttctaagaaatagaaaacaacaacttggcttaaataataagcacataaccaaagaaatctagaagtaggattcccttaagagttgagagatttagcagctcaaaaatgtgacctgacatacgagttctttctatgcttttgttcttcctcctccaacactggtttcacactaaacttggctccccagtggccaatagcaccaaacagcacttatcggcattcttgttggtatccaaaagagatggagaaagcctgatttcacatggctcttccttaaaagcaacaaaggacttttcccggaagccttcagcaaacctcgtcagatttgaatcacatgccaattcctaaatcagtcactggcagggaagtgggaaaaaggggaggaggtgtttacccttaaccaatatgcctacccctgcccactgagatcaattccataaaagtattgcttcagttctttgaagaggagtacaatgtttgtgagtcactcaccacatttacccaccaagagctaagggataactgagtaaaatggtagagctggtaggaaaatggtgagtagtcccgtccttctgtgccataattgacttgtacacaaagagatttggaaatttaaacataagaactctctcttcccaagcccagggctttgggcacttcaagtctggtccttgcctgggcacagtggctcacgcctgtaatctcagcaatttgggaagccaaggagggtggatcacctgaggtgatgagtttgagaccagcctggccaacatggcgaaaccccaactctactaaaaaatacaaaaattagttggatgtagtggcacacgcctggaatcccagctactcaggaggctgaggcaggaaaatcgcttgaatctgggaggcaaaagttgcagtgagctgagattgtaccactgcactccagcctgggagacagagcaagactccatcccaccccccaccaaaaaaaaattctggtctttacatgtgaaaaaataaaagctaatttttaaaaactaaataataaagagtgttaggtgataagttttatgatagagataatgtgtgctttaaaacacacagcataaaacagatggaaaacacctcatggagaagggagagcttgaattggtgtttgattgaaggacaagaaaaatctgttggtaacttcctcctggctctgacctctgatgcagttaaagtaaagcaacttagaattatgatctagggaacatattcagagagaaatgaatttatgatgtcttcaatttgaagatgctatgattttagactattctagaatacaatgatttttcattgcttcacacttgtaagaaatgttccactactgaaaatttgcaacacttaaaaaattcctacacaaaatcacagcccaccttgctgttctatgctaaataaacaaaatattttttctcaattatgttgctctccttaattacacgcaattttaaaactagctgtaactgacagccctttcctcacacttactgccaatgtatttaggtcaatcccacctccaattagagaaacttagaaaaaggaaatcctacggtgaaatgccatatgccttacaattttcagtaactaatcctcaaggatgacaacttggcaaaaaagagaactggaccagctccctgaaaggtccatcacttcggcccatgttaattgattgccttaaaatcacagtgcttccaggttgtagagacacactcaaaatggactattgccctcacattaaaggggataggttttcttttcccttttcccatccctgcttctctcaaagctgcacagaggtatatgaggtttggggaatatttgcagcacatgttggctggcaagaatgtgggtgaattcctgttaaggggcgcagacactccctcttctatgacctttcctttccacccagaacaactgaagtatcatgataagaggaagggctttgtgtttgagataagcagctcctatacctgtcagctttctctaataagaaagctctttcctgccaccgtataggtcaccttcttattggtaaagcatgatgaagtttggaaactgttgtccttgttttgttgaaagaagccaagttccaagaaatctgcagaggcattcctacaatccctcagccatggcagcatgaatcctgaaggggcagtgagtgctggtttctactctgtctgcacagctaagcctaggggagataatcttttcatacaagatgcattctgcttttgtgggcctcttgcagccctcaagcccccatctgatttgtacacaatgatccagtgggccagaggagcccagagccatgagcggcccatccctccaagaactatttctgactgtccagtatcatggagcaagtggaaagaagaaaaaaaaaacccaattacttttcgaagagcaagatgaatgctgtagaaggagaaggaaggggagggagatggatgggtgccgattccagaatcttcagatctgcttggatgaatcattacctatgatttgcgggacaagaatctgattttattcatcaaccagtagaaacttttctttctgcctcccaacatctgaaatccaacaaacatgtgccttaggaacataccggtcatcttttagaggcattttatatacatattgagtaactagaaaacactctttccgtaatacacacacacacacacacacacacacaccatcttgtcatacaacactcccacgcaagaaaagcgaaactgctgtttgatgaatgtaaacacttggctgtttgcagcagtcgggagtcctgccaggtttaagtgctaagatgggaggtgaaccccaggggtttccccctgcccgtgctgagatccttatttggtcaagcttctacctatgccctggcctcggagcgagcccgatagcgctggatcacagcagagggagcgaggcggctgacgtcccatcccgaagagatgaatggaattccaggaagctagagtcatgctggcttgggacagtggcttggagaccagacttcaatgacagaagcactaggcagcggcactcatggcaatgtgtgcacccacagaaatgtaacccacacctcgggttcaggagccgaaaaatgaaaagaacgtttagggaggaaaaagggaaatacaataataggcagagagtaatttattactctatgggtctgctctgtaaatagctgaagactctggagccagatggttctgcaaattctccaaacaggagtcacgttaagaagcacgagtgggcacaaaaactgtttttcaagacacaatttcaatttggcttgtggaaactggatacgagtaagtttccttaaaattcgagtagaaagcagctgtcctccccgggccccttgatgagaatacgcacaccgcccccaagcggccggccgagggagcgccgcggcagcgggagaggcgtctctgtgggccccctggcagccgcggcaggaaagggcccgaaggcagcgaaggcgaacgcggcgcaccaacctgccggccccgccgacgccgcgctcacctccctccggggcgggcgtggggccagctcaggacaggcgctcgggggacgcgtgtcctcaccccacggggacggtggaggagagtcagcgagggcccgaggggcaggtactttaacgaatggctctcttggtgtcccctgcgccccgtcggcccatttttctttttacaaaacgggcccagtctctagtatccacctctcgccatcaaccaggcattccgggagatcagctcgcccgaaagcccctgcgccaccccgcgggccctcctaggtggtctccccagccccgtcccttttcgggatgcttgctgatcaccccgagcccgcgtggcgcaagagtacgagcgccgagcccgtgcgcgccaaggctgcgtgggcgggcaccgacttttctgagaagttctagtgctcccaagccccgacccccgcccccttcactttctagctggaaagttgcgcgccaggcagcggggggcggagagaggagcccagactggcccccacctcccgcttcctgcccggccgccgcccattggccggaggaatccccaggaatgcgagcgcccctttaaaagcgcgcggctcctccgccttgccagccgctgcgcccgagctggcctgcgagttcagggctcctgtcgctctccaggagcaacctctactccggacgcacaggcattccccgcgcccctccagccctcgccgccctcgccaccgctcccggccgccgcgctccggtacacacaggtaagtcgcccccggcggccgccgaggaccaaagctgcccgggacatccacctggagcgctgaggcttcagtccctctggtggaccccggaacctacactctccccgctcgcctaccccagcccgctcctctcagccgctggaggactcttcagggcaaggctccagagccatcctctccagccttgaggttcacaaaccaactcatcaggacaccccaagatttccttactctctgaagtcctccttaagcctttgtatcagcactccagggaagagtctgtacttcccctgccctccctgcaaccccaaactacagttcctgatcttgctcaccttcgacttcccaaaagcccccaaattgttggtcttgcgccccccacactttaaaaccagcatctctttcctccacctctctctctctctctctctctctctctcatgctctctggaaagtaatcctgttgtccttcatttcagcaaacgcggggtcaaagagggatggtcccggccctgtccccatgcccagccccgtttctgcgcaccgtccctccctgcctagctgatctctgaccctcggctcttgtgcttcctgctacagg

SEQ ID NO: 52 - DNA, 7833 bp, Homo Sapiens
gtctttggtgagatatgtgttttacaagttttaatggagaaaaatgtaagtattttacctcctgaaacttggctatttgagtaatgagaaaatagtcactttccccaggacagtggttctcaatcatggctatgtgtttctccaggaaaactttaaaaatatatatataccaatgcttctgtgtcacttctagggattccaagtctttgaatacgaactctgcatcagtattctttaattatccaggtgattgtgatgtgaaatcatgactgagccccactgctctaagatgaaataaactttcctcagcactgaaatcacaaacttaaactaccaaaattaattaagggcatgggaatcaataaggcatagggaagcttttacattataaaattatttctttaaatcacagctcattgtttatatgttatttgccattgtagaaaagggtgaaaaaatagcaaatttaattactctcagtttgaaaaattatccagaaatgaagatgacgactctgaaacattgtcaatatcatttgacctataaataatgttctaatacatttactacacactgatagatactttttcatatgaatattatacattaaaactaaggcaataatgcatttagaacattctatctatatctatgtatcttaagtaggctagaaattaagatatgagttattaagtatgagatgttaaggtgtggggttagaaattatactgtacttcattatcaataatcaacatatacttcaatatcacatacatttaactttaatttgtacatctttaactatttttaattatgtgtataaatataagtacacacatctttatgtatttatttattcatacctccattcacttatttatataggggatccccccaaatccactaccattaaaccatacatttttattttaatctttagaacaagcccaggaggcaggtattgttattactcacattttacaaatgaggaaattgtctacagtcacaaagttactgtgtcagacatattagaagcttaatacatatttggtgaacatatgcataaaaacagagagacagacatgtacaacagctcatctttacactgagtaaaagcttttaacctgtctcagaaacctctctgtgaaaactgagcaaaaatcgaggtatcctttcatttgtcatataggtataggtggtaccttacttctccaacaaggatgaatattgaaatgtggatcccaaggcccaactccagattttctgaatccctgatagtgggacttggaatttgtctattgtttcaaagtttctcaaggaattcatatgatcaaccaggttcagaaatcactggatcttattgccgaagtttgagaattaaagtttgggccttactgcggctccacagaaagggcaaatgaagtatcatggacagaactgatacgttcccagttagtttcccctctcagaagctaacaggcagcaatacagcagaaattagtgacttatgtcttgtgctctgaagtcaggcagaatttcacagagtcccagcagtgtcactgacgagatttgtttcttggggcaagttgcctgatgctttcaaagccatattccttttatataaaatgagataatattctttgtctcataggggtgttttaaagattaaataaaaataacatgttctatcctacatggcacaatgcctgacacctaagaagcaaaggatacatcttacctttattgaagcaatcagaaagtatgaaatcatgaaggagataagagttctgattggcagtgtatcttattttcccaggttcatttatttatcttaaactattcttgttggagaataactcccaagccccctacttaagctgtgagtaatctcacactttataatgatgttctttccatgagaaaaaaaaatgttcttaagttttctggagaaaatatatctgcactatttctactgaaaaatctaacaactggactctgctcctctgcatcaattctagagtgtatatgccacaaataaagtgttctagctcaagaagattgaaagtaaatatggtatagtattttaaaataagaattttgcaaatacatggtatgattgtgtcatattactagcaatcatatgatacgcaatgcaaagtacagttcatagacttaaatttaattctaataagtaaactgattttgccttgctggggaaaagttaaagcactaatccaattgctaatgcagtcttgtctacttctttggtacctagtgacaagtctaaataatgtatatatttttatttacatattcagtaatacaattctctgctcaatgagtgatgttcttctgccacttggtggtgcttgccagtttcagaatttgtttcttggtggcactataacactaagtacagagtaagtgcaacaaaattgcagcattcccattgaaaaggctttgcttcaaactgtttaataatttaaaggacctctgtggaagcaaccgcatttgttaaccagttacaaccagtaattaactcctttggagttttaacttacttttggcaaaacgtcttaggaagagcatatattattagaaagtatgccaaaaatttacttagcagaaaattcaaaaacagttttcctctgctaagaggttctctaaaattctacttacatagccaaactctgaaatcctagcaggtcctgtttcattatcataattactgcataaacacttttaaggactttgcctttagtttcaagcatgacttattttcataagcctgattagttaccacaccagccttgctatggaaaatgacatgttctcattctctgctgtagagttgttaaatcttgatctatatttatgttgccttctctgctgaaagcctgtagcgaaagaaatttctaattccttgttttgcaatattagttggcagctctatctaatgggtattctgtttccttaaagaatttagctgctctgtctagaagccgattttctgatgcctccaacgtctggtctaattgatctgttttaatggagtcttcgtcggtgaggagcgagatgccaccgactagaatgctgggatctgctgcttaattgccaggagtgagagacactgagattcagaaatctttggaggtgggaggggagagggacagtctcggacggaggcggagatgtaagataaagggatggatttcacacaggaaaaaaaaaaagatttcgttgaggcactgaggtgctgcacgatcacatctctcaaaggagaagttaaaaagcaaggaagtgggaggaggttggaggttaaagtacttaaaaggattactcgggtacaatttgtttttctgctggtgtctgcaaaggatagatagtcccgttttcaaagtatatgaatgcctcttttaagtgattgggaatggacactaattgcctgttaaatgttatcaaatgctctcctaaattcaggggacacagaaagaggggcacaaaaggagaatttaaatagaaaaagggaggatccggaggcttttgaaagcggggggagaagaaggaggagggataacagagaggaatagagaaggagagcggagagaagataaacaaaaacaaaaacaggaatcactgaataatcacacaccaaaaagaaagctcttccctatggggcatccaaaacactgagactgcaatagtgaccccggtcatggaagaaagatgttcctctccacccttgtccccgaaagctcttggtcccgttactggcgactaaaattccattaggctaaagagtgtgtctaactgcctgaagaatgcagcagacggaaggcgggtcccgctatgccgtttgcccttcccgctggagagaatgaaagaaacgcgcagagccagagactcctgccgagttagaccttctctcgtcgccccaggtcaccggccatccggcaaagacccgagtaaggaacgcagggtcactgcctgggccaacaaatggagcccgctctccccttcccggacgccgctgcccggccgatgctcccggcaacccacccgcggcgtatgcagaggagcctttctctttctctcagaccacttgtcccgaccaatctgaccttccaaacacatctgaccgcacctcccaggtggacacactaataggctacgggctggagaggagcgggtgatgaggagagggattcaaacctgcgaacgcttgggctgggtcggagctgcggggggcctgggaggagagaggggagaagagagaaggaaggagagcgcctgccgggatggctgagctgcctcggcgagcagccttggggttgcacgctcttgtgggagatgctgctgttgcttccaggtcggcaagagcggttctaacaccatcgcctctcaccctctttcctgtaaatccctagagaaacgtccctggcctctccgccgcgacattcccagcctgcatccccctacagcctaggcggcgcgctcccgcacgctggagcgccggtcgccagcaggacgccctctcccgcgccgactcgcccctctctgccctgctgctgctgctcctctgacacctccgcccccaccatctccagctcggagagacgccacccagccgcggcccgcactcgcggcccggggtcacgcgcggaagaggggcgctagtccggaccccgccttcggtagggggcgtcctggagcggagagtgaggcgaatggtatatgagtgtgcgggtagcccaccctgaagcccgagcttctcatttgagccatgccccgcctagccccactcgggccagcgcctggcgagcgagcccatctgtggcttccgcggccgcctcctccttgcatccttgcacctactcgtcgacccctccctcccgggacctgcatcctgctccaccaatcagagcccgactgcctcttcccacgtgaccccgggcgggctgaggacctgctgcttcccaaacgccagagggatgcgggcggcagagctcgagaggcggctgccgggctgcggggcgccttgactctccctccaccctgcctcctcgggctccactcgtctgcccctggactcccgtctcctcctgtcctccggcttcccagagctccctccttatggcagcagcttcccgcgtctccggcgcagcttctcagcggacgaccctctcgctccggggctgagcccagtccctggatgttgctgaaactctcgagatcatgcgcgggtttggctgctgcttccccgccgggtgccactgccaccgccgccgcctctgctgccgccgtccgcgggatgctcagtagcccgctgcccggcccccgcgatcctgtgttcctcggaagccgtttgctgctgcagagttgcacgaactagtcatggtgctgtgggagtccccgcggcagtgcagcagctggacactttgcgagggcttttgctggctgctgctgctgcccgtcatgctactcatcgtagcccgcccggtgaagctcgctgctttccctacctccttaagtgactgccaaacgcccaccggctggaattgctctggtaagtccagaacccccgtccccgaccctttaactccgcagaagaacacgcgtatccagcacagaccagcctaccctagcgcgcctcctcagcccctcacctcctactgccctagacccctaataccacccacctctatccagagaaacaaggggaactgttgcaggcccgggggtgaggggtggttctgggatgggcagaaagtgcaggtgtagcaggaaacctttgcatgcttgcgcttacattggagctgcgaggattttgagaaatattaaacgggatggttttctgggttcactgttttgaaagagcaccaatcctaggggaaacactgaaacagaagctttgtcatcattaaagaaaaaagtcttactaggatgaggaagaaataactttatgagaaagaatgagcgagaaagcaataaatcaaatggtgactgcaggggaatcgctgattcctggcaaaggtgccatgaggtcgcactggtctcccgttgaagaccaggtcacacagattctagaggagctgggtttcaatagaatttctctctctctctctctctctctctctctctctctctctctctctctatctatctatctctctctctctctcattcccttctctcctaggcggcaaaagacattggttttgcagtccagatatgcccctctctttgcttccctaagcttcaaggtagtacaggggagttgagaaaaagaacactttgcgggtctcccaggccggagtgggcatgactgaggctggtcaggctccatgtaggcgagccgagggcggaaccgacttcagtgggcgctgactcctccatttctggacaggcttctgtggagtgggtcaggcactcttcttgctcgctcgggttccttcagattctgacggcgaacgcttggcaggcttcgctctgctgaagcttcctaattaaatagggccagaggatgggagttgctgcactcctagctggcatagcattcggtttgacagcctgtagtatagggtgtatgtaatttttcatcttctgtgaatataattttgctgtagttaaatctggctctgaataaagtgtctttcaaagatgtatataagctgaagtgtatgtaactttagagaggagggaatgaccaactgtaactcagggtgaaagcctgtatagttcctagttattactgatgtaaatgccaaaaggaaaattattatgcatcattctaatttatcctttacaaagacaagttgagatatgcaaccctattagatttgggtcaatagattgttctcttttttggcagtttctaaatttggcattttaataaaactcaacatgtttctataacttcttgattcatgcgtacatgtgtgttgtttttgaaagaataagtttcactttgctattgcctaatcactttttagatgctttattatggtaataattatgagcctgcaaaaacaatttttggaaatgttgatggctttgtagtccaacacagactggtttgcttcattcctagcccttgcattgttttaggaaataactaacttaaatgtgaagttgacatttgcaatcaagaaattacatatttaccagatattttaaaggggactgcataaactaaagagaataaactggttttgcagataggttgtcaagaacttggcaccccgcttccacccctgttaacttagaggtgatcaatcttcatttgagccaaacagaccatcacagaaaacactgtgcctgtttatctttattattgaggctttgtttcctctttgtctggatacatttcaaataaggggttgtttcagtcgttgaagcaaaagaacaattaaagatggggaaatggtaaaagggtattcagagatcatcactagctcttttccaaaatgtggagttttgtggtcataaatattgtccacctaatgagcaaaaaataaaaataaaaaaaaaacaggaagcaaatgttaagctttcattcaccactgtcagtattaacgcaagctttaaaaaatagcactatcagaaaaggatactaaaggagaattgactagaaaagaattgtggaaaatggaaacgaatattgatcacttaactagattttgaggttatcagtagacagtgaccttgcagtacagctatagttgttggatttaaaatttaggacaagtattttaaagcttcaaagtagtgcttttttttgttaaaaatctgtaagatgttttaatgactggagtgttctctttgaatttgagg

SEQ ID NO: 53 - DNA, 7258 bp, Homo Sapiens
ttcaataggaagcaccaacagtttatgccctaggactttgttcccacaatcctgtaacatcatatcacgacacctaacccaatccttatcaagccctgtcaaaaacggactttaaaccaagctgcaaattttcagtaatctggccttgcctttccccctctgatagcaccatcaaacaaacccccttactgccgaaagcaataagcccggctttgttccatccactggttgtgttggtgatatctggggactgccactgaacagacgcacagagggagcccctacaggcaggggtttttctgtctgtgcttcttgggagagtatgtctcgtacatttgtcgcgtgatgaagacttcacagctccatccagcgaccagactcacagctccatccagctgcggcaagggggtctgaggcagtcttaggcaagttggggcccagcgggagaagttgcagaagaactgattagaggacccaggaggcttcagagctgggctgaggtagagagtctcctgtgcgccttctctcctctctgcaattcggggactccttgcactggggcaggccccggcaggtgcatgggaggaagcacggagaatttacaagcctctcgattcctcagtccagacgctgttgggtcccctccgctggagatcgcgcttcccccaaatctttgtgagcgttgcggaagcacgcggggtccgggtcgctgagcgctgcaagacaggggagggagccgggcgggagagggaggggcggcgccggggcgggccctgatatagagcaggcgccgcgggtcgcagcacagtcggagaccgcagcccggagcccgggccagggtccacctgtccccgcagcgccggctcgcgccctcctgccgcagccaccggtgagtgccgcggtcctgagatccccgggccggatgcgcggcggccccagctcccgagcgtctgcctgccccgccctgggctgcccgggctccctgggctccccggcggctgcacggagtcaaggcgccccgtcccgggcgtcccccgcgggtgccgatccaggctgcccggagtccggagcccatagaggagagagacagctggggagcctggtcaccgcgggcatctcccctgcgctgcagtcgcccgcctggcctgccttcccgttcctccgcctcttgccctgacttctccttcctttgcagagccgccgtctagcgccccgacctcgccaccatgagagccctgctggcgcgcctgcttctctgcgtcctggtcgtgagcgactccaaagtgagtgcgctcttgctttgactgatgctgcccaaggacctctgatcagcaccaggggagaggaggggctgctcagggagctggggtctccggattccatccacagcagggccagactctccccaggaaatgggacagggtggcagcggaggcttgagaaccacgggggttggcactggctggcaagggaggaagagggccaccgggactgccccagcctgcgggcatctggtagatgaagcttaatccatttctcctggctggaaaccatggtcttccatttgagaactagatacgaacagggtgaggcgagagggagagggaagagtgggttttgggattggggccagtttaccctcaccctggatccctggagcatgggacctttgatgaagcctcctcccgaatctcttccagggcagcaatgaacttcatcaagttccatgtgagtatccacccctacaacagttggctgcacagacaagttgggaaggcttcaggggacactcccctccctgccctctgctgcagcgtgcgccaccccttaccacttccactccccctcgcttaccccacctttgttctctccagcgaactgtgactgtctaaatggaggaacatgtgtgtccaacaagtacttctccaacattcactggtgcaactgcccaaagaaattcggagggcagcactgtgaaataggtatggggatctccactgcaactgggagagaaatttggggacagggagggatgggtgggaggcaagagcaggcaggagttaggagctggaggtagggtgggtgacatcttcatccctatgtgacaagcataaacacacacacacgctcacgaaacagtggccacacaaatgtgaggtggggttggaaggagaccctgtccagtcttctggcaggtctgaaacgacatctttaaaatgtccgttggcagccgggcatggtggctcacgcttgtaatcccagcattttgagaggtcaagtttgagtggatcatttaggtcaggagttcaagaccagcctggacaacatggtgtaaccctgcctctactaaaaatgcaaaaatcagcctggcatggtggtggatgcctgtagtcccagctacttgggaggctgaggcaggagaattgcttgaacatgggaggccagatctcagtgagctgagatcacaccactgcactccaactgggcgacagagcaagactccatctcaaaaaaaaaaaaaaataaaagttagttggaatgttcttctctttctcatattctctcatcctcctgtccccttgtagataagtcaaaaacctgctatgaggggaatggtcacttttaccgaggaaaggccagcactgacaccatgggccggccctgcctgccctggaactctgccactgtccttcagcaaacgtaccatgcccacagatctgatgctcttcagctgggcctggggaaacataattactgcaggtgaggtgggggcaacaaggaccaaaagccctccctacagcttcccagaaaccttgttaccatccccttctcccagagggctggccatagcacaagagaagtgcggcctctggttgagtcttccctgaggggaggaggcagggaaggccctctgggttggaatgacatcccctatctttctgtgttgtgccaggaacccagacaaccggaggcgaccctggtgctatgtgcaggtgggcctaaagccgcttgtccaagagtgcatggtgcatgactgcgcagatggtgagcatcactgacctgctgatgacaggtgggtggaaggggacaaacttacatgtccccttattccatcacaggaggactgaggaggtggggggtgcccgagagggatgctttctcctacctgcctccctaagacatccctctgtttgtcctccaggaaaaaagccctcctctcctccagaagaattaaaatttcagtgtggccaaaagactctgaggccccgctttaagattattgggggagaattcaccaccatcgagaaccagccctggtttgcggccatctacaggaggcaccgggggggctctgtcacctacgtgtgtggaggcagcctcatgagcccttgctgggtgatcagcgccacacactgcttcatgtacggccctgggtttctcctcttcgactcttctgccccaccccaagcacatccctttctccttcccagcaaagtgttccgcctcatttctccctcatctgcccctgtccatgcgcccatggccttggggacaagtcgtgctttgaggcctctagggagggaaggaagaagtggcatgatttcatgggactaagctgtttgatgggtatcttcttccacagtgattacccaaagaaggaggactacatcgtctacctgggtcgctcaaggcttaactccaacacgcaaggggagatgaagtttgaggtggaaaacctcatcctacacaaggactacagcgctgacacgcttgctcaccacaacgacattggtgagggggaacgcccgcgactactgtggccataatggcttggggagagtgggacccagggagagactggagctgagttgaagctgccggtggggcaggggtggggcgagggaccttgaagcctcgatatacatgacaaaggatggcagggaagagttccatgaagtctgaggggcctggtgctcctctggagagaccctgaatttccccaacaagtagccctcttgcgagtggaaacagccctgtgggtatatggcttgggctgggaaggccctgtttatatgaattagaaaaagacacaccttcctttgtgggatgcagcctctgtctgtgctaggatatagaacttggagaatggagccttgggatggattccagcctaactacctcagggggatcctctagagtgcagctgggagtttttgcagaaacgacctgtacagctgtatgcagtggctctggccatccaagcctttttcaacacctggaacaaagcccttggggcatggggcaggggaggtttccaggtgataagcgaccagcagacctccctggatgactgacctagggataggcatagctacttcctcggcacttggaggggacagatggggaccgcctaaccagtagtgatctttctcctctgaccctctgtcctcccccagccttgctgaagatccgttccaaggagggcaggtgtgcgcagccatcccggactatacagaccatctgcctgccctcgatgtataacgatccccagtttggcacaagctgtgagatcactggctttggaaaagagaattctagtaagtgacaattgcgactgacttagaaggtcctgaggagtgttttgacctgaaaatgagcccagtgtgatcaagggaagactgcagagttagaggtgggagcactgaggcggtggcagatgggtccagggatggatgaagagtgttgtttagggagcgatgggctgcaaaggtaaatagatggtaggggctataggtggaggtaaatggctcagatttgcatggagagagaataatgggcctctccctgggtgatgatactttatggtgtcccctctctggcgagacgtcccacgtggaggcagataaatcttgatgcaaacgcctccctgttttctccacctagccgactatctctatccggagcagctgaaaatgactgttgtgaagctgatttcccaccgggagtgtcagcagccccactactacggctctgaagtcaccaccaaaatgctgtgtgctgctgacccacagtggaaaacagattcctgccaggtgagtgttccaagcatctctctccacctcttccatatctccccagagctcctgggcttgttccagccagcttaagggtgtctctctctagccaaagccctaagtagccagaatcaggagctcaggtctttgagggtttaaaccagtccttatgtgtttgccagacattaccaaaaaaatcccagctctgcgctagtcacttcagactgggggcacgagatcctagaaagaggaaacagtaaaagacaatgtaactcagtgcccagggtgtgttgtgaactataaatgatcaggtgttcaggagagggaggtgagtgccaacctgagggtcagggaggggaggctttaaaggaaatgtgacttgataggcatttgaagaggcagagggaagaaaggaaggtgtttcagttgaaagatacaaaactgagaaggaggctggcatattccgggtggggaggagaactagggtctgggagtgtggatggaatagtggcagatgacagggcttttaaagccaagcaggggattttccaacttcgatgtggtagaaatggggctgcgtcaggcacagtggctcatgcctgtaatcccagcattgggctaggccgtagtcgatggatcattgaggccagagttgagaccggcctggaccaacatggtgaaaccctgtgtctactaaaaaatgcaaaaaaaaaaattagccaggtgtggtggtgcctgcctgtaatcccagctaatcaggaggctgagacatggaatcgcttgagcacaggaggcaagtttgacgtgagctgagatcacgtcattgcacgccagcctgggcgacagagcgagattctgtcctcccgccgaaaaaagaaagaaaatgggaagtcgctaaggactttgactgggaaactcttccctctctctggtatggttgggtgatgggatcagaaatcccctcctcacttctctagggctcatcttttgtatctttggcgtcacagggagactcagggggacccctcgtctgttccctccaaggccgcatgactttgactggaattgtgagctggggccgtggatgtgccctgaaggacaagccaggcgtctacacgagagtctcacacttcttaccctggatccgcagtcacaccaaggaagagaatggcctggccctctgagggtccccagggaggaaacgggcaccacccgctttcttgctggttgtcatttttgcagtagagtcatctccatcagctgtaagaagagactgggaagataggctctgcacagatggatttgcctgtgccacccaccagggtgaacgacaatagctttaccctcaggcataggcctgggtgctggctgcccagacccctctggccaggatggaggggtggtcctgactcaacatgttactgaccagcaacttgtctttttctggactgaagcctgcaggagttaaaaagggcagggcatctcctgtgcatgggtgaagggagagccagctcccccgacggtgggcatttgtgaggcccatggttgagaaatgaataatttcccaattaggaagtgtaacagctgaggtctcttgagggagcttagccaatgtgggagcagcggtttggggagcagagacactaacgacttcagggcagggctctgatattccatgaatgtatcaggaaatatatatgtgtgtgtatgtttgcacacttgtgtgtgggctgtgagtgtaagtgtgagtaagagctggtgtctgattgttaagtctaaatatttccttaaactgtgtggactgtgatgccacacagagtggtctttctggagaggttataggtcactcctggggcctcttgggtcccccacgtgacagtgcctgggaatgtacttattctgcagcatgacctgtgaccagcactgtctcagtttcactttcacatagatgtccctttcttggccagttatcccttccttttagcctagttcatccaatcctcactgggtggggtgaggaccactccttacactgaatatttatatttcactatttttatttatatttttgtaattttaaataaaagtgatcaataaaatgtgatttttctgatgacaaatctccctggtgcttgtatgggaaggagttggagtacataaaaaggagaaaataacaaaggtgg

SEQ ID NO: 54 - DNA, 2501 bp, Homo Sapiens
gcaaatttttatattttgaggagagacagggtttcaccatgttggccaggctggtctcaaactcttgacctcaggtgatccacccgccttggcctctcaaagtgctgggattacaggcgtgagccaccaagcctgacgggtagtaatttattttttatataatttttttcttctttttttggtagagacgaggttttgccatgttgctcaggctggtctaaaactaccgggctcaagtgatctgcctacccgggcctcccaaagtgcagggatcacaagcatgaaccaccatgcctggctgtaatttttcatatattccggatattaaccctttaccagataatacagtttgcaaactttttttttccccattctgtaggttgccttttcactgttggtcatttcttttgctgtatagctatccttaagtttgttgcaaacccatttgtctatcttttgtcttgttgcctgtgttttgctgtcatatccaagaaatcattgccaaatccattgtcatgaagcttttccccatgttttcttctaggagcactatagtttcaggtcttatgtttaatctttaataagttttgtgtttttgtatatggtgtaaggtaagggtccaacttcattcttttgtatgtggttatacagttttctcagcaccatttgttaaagacacaatctttcccccatgttctggtgctttaaaaaaaaaaaaaattctggctggttacggtggcttaggcctataatcccagcactttgggaggctgaggcaagtggactgcttgaggctaggagtcccagactagcctggccaacatggtgaaaccctgtctctaccaccgaagatacaaaaattagccaggcgtggtggagtacgcctgtaatcccagcctactagggaggctgaggcatgagaatcgcttgaacctgggaggcagaggttgcagtgagccaagatctcaccactgcacgccagccggggtgacagagtgaggcagggtcttaccctgtcgcccaggcaggagtccagtggcccaatcatggctcattgcagcctacactgccagggttcaagccatcctcccacctcagcctcccaagtagctaggattacaggtgtgtgtcaccatgcccagcaaatctttgtattttttgtagagatggggtatccctatgttgctcaggctggtcttgaactcctaacctcaagcgatcctcccacctgggcctctcaaagcactgggattacaggcgtgagccactgcgcctgacatggtgcttcttaatttattcttactttttatttttatttttttgagacaaggtcttgctctgtctcccaggctggaatgtagtggtacaatcatggctcactgcaacctctgcctctccggttcaagtgatcttcctgcctcaacctctggagtagtttggactatgggcacatgccacaacgactagctaatttttgtttttctttttttctttctttctttctttctttttttttttttttgagatgcagtttctctatgttacctaggctggtctaaaactcctgggctcaagcgatcctcccaccctggcctcccaaagtgctgggatgacaggcgtgagccacgtggtgcttaaaaaaggcaacaaaaaaccccccacacactgggtatagaagtggcatgggcctctatacactgtgagattcttggtactagctacaaattctgtgtatactcaagattttctagagtaggtgcaattaccccgttttacagatgaggacacagaggctgagccgtagtgacccacctaaggtcgtatagccagcaaatagatggaggttggattggaactgaggactttactcaagggctctcacaaacccttgggggcttctcgctgctttatccccatcacacctgaaagaatgaatgaatgaatgcctcgggcaccgtgcccacctcccagcaaaccgtggagcttggacgagcccactgctccgcgtggggggggtgtgtgcccgccttgcgcatgcgtgttccctgggcatggccggctccgttccatccttctgcacagggtatcgcctctctccgtttggtacatcccctcctcccccacgcccggactggggtggtagacgccgcctccgctcatcgcccctccccatcggtttccgcgcgaaaagccggggcgcctgcgctgccgccgccgcgtctgctgaagcctccgagatgccggcgcgtaccgccccagcccgggtgcccacactggccgtcccggccatctcgctgcccgacgatgtccgcaggcggtaggtaccatgggggggaacacggactcagggggacaggcagggcgctgggtggggggtcgcttcccctcggggtggccggtggccgctgctgacagacgggcgcgcatgcgtggggtggtgcggcgcgcagcggcagttggcgcgggcagggtggcacttccggtcgcgcgtgcccgggctg

SEQ ID NO: 55 - DNA, 6815 bp, Homo Sapiens
ctgcttgcgaactaaaaattcagagctctcttgtgaatcatgctgccaagaattgcagacttaagcctcaagattgtacgaatttaaattttgactttatggcctcagttggcatgaagatacaaagataatcttctagcaaaaacagttttgaaagaccgggcgtgatggctcatgcctataatcccagcactttgggaggttgaggcgggtggatcacctgtggtcaggagttcaggaccagcctggccaacatggtgaaatcctgtctcaactaaacatacaaaaaaattagctgggtgtggtggcggacacctgtaatcccagctacttagggaggctgaggcaggagaatcgcttgaacccaggaggcagaggttgcagtgagccgagatcacaccagtgtactccagcctgggtgacaaaagtgaaactctgtctcaaaaaaaaaaaaaaatggtagaatgtcacatggaaagttaacttttagagatagtaatccagacacctataatattacattgtccttttaagtatctatatcaataaattaaccaacatttgttgacttaacatggccagggacagtgctgggttctcataattcccaagtaattctagccagaccttgtcctcaaggagcttatgagcagcatgaggagataaaaaacagataaataactctaattcaggaagaatttgataaatgcatgataactactactagaattcagaggagaggaaattttctttgaatagagactaaaggaaggaataatgaatgtggtagcatttgggctggacctattacaagaggcatgctttcccctgacaagccaagaaagtggggatttaaggtagaagaaaagaaaagccttgagttcttggagtattaaaattttgcttggctgaagcataggttacagtcggaggagatggactaggaaggatcgttatgggcagagaggaagccctgaactcatgggggaagctatgatttgggttaaagacagagctgggtcatgtcaagatggatcctgaagcagtaaaaaaaaatccaagaaagtaaacaggttgcagggtttaggatgaagtccgggaggaaagggcagagtggtccttaggaggccgttaggacaggtaaggtaatgggtctcaaagggagtggccgaaatgcaatggaaaaagagagattgtaaagctagaaggcttaggaattgcctcttgattaggtgtggaaggcaagggaaaatcagccctcgaagaagacagtgagattttaatctgggtggctggagagacagtgatgctgggcacagacacggggaagttgagaggaacaccatgtttgagaatggtgactcatatttgaacaagcctgcaatgcccagcagaccgctggaaaagtggggctggagacacattcaacggaggagccagatcaatctttacccttcttcacctgagagagccagtaagtcacggctggaacgtgtgtgtccagcaggagagggtagggagggaagccaagagagctgggagcccgagtgaagtttttgccaaaggcagaagaggaaagtcggcgtagcacagtatactttcccacccatgctcaccaagcccagggacaaggctcaccaagatgagtttggaagagaatgctggagagaaagtggttaagaaaactgcctttactgaacttcttgggctaactttgattgtaagtctctgaacaatcaaagcctgtgaggagacagctaaccttcttattcttcctatgtcaatagtgaacaattgcagatcccctttcctttccttctcctttcccctgttcctctctcctccctccctgaatactcttgcttttttctgggactggtctagagcatgggtggccattgttgacctacaggaggcaccactgtcaccaacaaagggtaacagtctttcttttcaatatttatttatatccagtatttattttcaatactgactatggagagagctctcctgtgctcaaacactgcaatactgggggtctttcaaagcacaaaaacatatatttgcatgatggcatcattaacatttttatggctttctatttcttttttgtactggtctcaagagccactcataaatctctcagtaactgcatagtgtcccagggccagagaccggccactcctggcattgtgattagagtcatttaatatccaaggtggtgactaatgtctggcaacaaagcctccattgggtgtcatgtgtcctgggaccctgagcgtgggcactctaggagcacctcagtattgcgtgttagtactatggccgagagaatagttgagaaagtggtcaagaggtggatccatgtgaacgccactgggaaatgagagacctcgttcccaatcacggtcagtgcaactcgaaagcctaaaatcagtttaaaacaaaggtatctacctttatcttatgttcatatcctaggcttttaataatacgtatttttcacatgtttacagaaagcagtcaactgagctattcatggaaaggtttgtgggtttggttaacgaagtggaggagtattacatttcagctggaaacacatccctagaatgccaaaacatttattccaaagtctggtttcctggtgcaatcggaggcatggcaatgcctctgttcagagactgggggctagggccagtaaggcatttgatccacatgtatcccagaaggcttttattgttaaattatattctttcggaaaaaccacccatgtcctattttgtaaacttgatatccatacacttttgactggcattctattttagccgtaagactatgattcacagcaagcctgtttttcctcttgcttggggtggcagcagaaagcatagggtactttccagcctccaagggtaggggcaaaggggctggggtttctcctccccagtacagctttctctggctgtgccacactgctccctgtgagcagacagcaagtctcccctcactccccactgccattcatccagcgctgtgcagtagcccagctgcgtgtctgccgggaggggctgccaagtgccctgcctactggctgcttcccgaatccctgccattccacgcacaaacacatccacacactctctctgcctagttcacacactgagccactcgcacatgcgagcacattccttccttccttctcactctctcggcccttgacttctacaagcccatggaacatttctggaaagacgttcttgatccagcagggtaggcttgttttgatttctctctctgtagctttagcattttgagaaagcaacttacctttctggctagtgtctgtatcctagcagggagatgaggattgctgttctccatgggggtatgtgtgtgtctcctttttctttcaggacttgtaggattctttgtgccatttgcatataatttggcaggttcacattttttaagagccctatgaagtgctttttgcatgtgttttaaaaaggcatttgaaaattgaaagtgtgatttatggaaattaaatcatctgtaaaaaattgctttggaaagtaatgattgctggccataaagggaaatatctgcgatgcacctaatgtgtttttaaccctttatttgctgacaatctatagtcattaatgctaaactcgattttggcttcagctacatttgcatattgtccaacaatggtctatttttgtaagaattagataaaatgtatacttgatataaaatagtcaaaaatgtaactcttagtaacagtaagcttggcatttagatagaccatgaacacttcgtcagatactctgttgggtgtttgggatagcaattaaaacaaagtattgatagttgtatcagagtctattaggctgcagcaaaggaagtttattcaaaagtataaactatccaagattatagacgcatgatatacttcacctattttttgtctccttaatatgtatatatatatatatatatatatatatacacatatatgtgtgtgtgtatgtgcgtgtgcatgtttaacttttaattcagttaaaaacttttttctatttgtttttcatctggatatttgattctgcatatcctagcccaagtgaaccgagaagatcgagttgtaggactaaaggatagacatgcagaaatgcattttaaaaatctgttagctggaccagaccgacaatgtaacataattgccaaagctttggttcgtgacctgaggttatgtttggtatgaaaaggtcacattttatattcagttttctgaagttttggttgcataaccaacctgtggaaggcatgaacacccatgtgcgccctaaccaaaggtttttctgaatcatccttcacatgagaattcctaatgggaccaagtacagtactgtggtccaacataaacacacaagtcaggctgagagaatctcagaaggttgtggaagggtctatctactttgggagcattttgcagaggaagaaactgaggtcctggcaggttgcattctcctgatggcaaaatgcagctcttcctatatgtataccctgaatctccgcccccttcccctcagatgccccctgtcagttcccccagctgctaaatatagctgtctgtggctggctgcgtatgcaaccgcacaccccattctatctgccctatctcggttacagtgtagtcctccccagggtcatcctatgtacacactacgtatttctagccaacgaggagggggaatcaaacagaaagagagacaaacagagatatatcggagtctggcacggggcacataaggcagcacattagagaaagccggcccctggatccgtctttcgcgtttattttaagcccagtcttccctgggccacctttagcagatcctcgtgcgcccccgccccctggccgtgaaactcagcctctatccagcagcgacgacaagtaaagtaaagttcagggaagctgctctttgggatcgctccaaatcgagttgtgcctggagtgatgtttaagccaatgtcagggcaaggcaacagtccctggccgtcctccagcacctttgtaatgcatatgagctcgggagaccagtacttaaagttggaggcccgggagcccaggagctggcggagggcgttcgtcctgggactgcacttgctcccgtcgggtcgcccggcttcaccggacccgcaggctcccggggcagggccggggccagagctcgcgtgtcggcgggacatgcgctgcgtcgcctctaacctcgggctgtgctctttttccaggtggcccgccggtttctgagccttctgccctgcggggacacggtctgcaccctgcccgcggccacggaccatgaccatgaccctccacaccaaagcatctgggatggccctactgcatcagatccaagggaacgagctggagcccctgaaccgtccgcagctcaagatccccctggagcggcccctgggcgaggtgtacctggacagcagcaagcccgccgtgtacaactaccccgagggcgccgcctacgagttcaacgccgcggccgccgccaacgcgcaggtctacggtcagaccggcctcccctacggccccgggtctgaggctgcggcgttcggctccaacggcctggggggtttccccccactcaacagcgtgtctccgagcccgctgatgctactgcacccgccgccgcagctgtcgcctttcctgcagccccacggccagcaggtgccctactacctggagaacgagcccagcggctacacggtgcgcgaggccggcccgccggcattctacaggtacccgcgcccgcgccgcccgtcggggtggccgccgcgcccggcaggagggagggagggagggagggagaagggagagcctagggagctgcgggagccgcgggacgcgcgacccgagggtgcgcgcagggagcccggggcgcgcggcccagcccgggggttctgcgtgcagcccgcgctgcgttcagagtcaagttctctcgccgggcagctgaaaaaaacgtactctccacccacttaccgtccgtgcgagaggcagacccgaaagcccgggcttcctaacaaaacacacgttggaaaaccagacaaagcagcagttatttgtgggggaaaacacctccaggcaaataaacacggggcgctttgagtcacttgggaaggtctcgctcttggcatttaaagttgggggtgtttggagttagcagagctcagcagagttttatttatccttttaatgtttttgtttaatgtgctccccaaatttcctttcatctagactatttgattggaaatatgtcagctatgatgatgactttctgggaagcgattcctgtcacccgctttcccctcctccccaccccacgtcctggggctttagagagcgattgggagttgaatgggtctgatttcggagttagctggctgagtccgcgctggagcggattgctggcatgtgacttctgacagccggaaatttgtaggtgtcccgcgagtttaaaacaagccatatggaagcacaagtgcttaaaaataatctcctgccagcccagtgacaagcctgtcccacccggggagaatgccccggagtggcgtgcgggtcagccagggtctgcgcctcgcagccactgtggaaggagcgcggccggtccaggacacaggagaccactttgtgacttcaatggcgaaggttgtgtgtcctcattttaatttttttccctacaagaattgttctttctccctctcctctccctcccattttctcttgcccagtttctcctttt

SEQ ID NO: 56 - DNA, 8020 bp, Homo Sapiens
ggcgcacacctgtaatcccagctactcgggaggctgaggcaggagaattgcttgaacctgggaggtggaggtggaggttgcggtgagctgagattgcgccactgcactccagcctgggcaacaagagcaaaactccatctctcaaaacaaaacaaaacaaaacaaaacaaaacaaaacaaaaaagcaattaaaaaatctattgaagtttccataagaaacaaaattttcacaatggaaattccagctgattaaatttctatgtaattaaataagcatgagtgacaggttttgtgtcttgtttagtaatttaacaactttttaactttctgaaagtagaatcacctcaattcttacctgaaaaatttctataagagtttagaaaagagctatgcaaactgacactcaagccatatgggtttgggcaacttatctccagtgtttattgtcaagatgacataggatatatcaggcctttttttttttgcagggtctcactttgtcacccaggctgagtgctgtggtgcaatcaaagctcactgaaacctcaaattccggggctcaagcaatcctccaacctcaaccccccaagtagctgggactacaggcatgcgccaccatgcctggctaattttttgtattttttgtagagacagggttttaccatgttgcccaggctggtcttgaactcctgagctcaagatccgcccaactcggcctcccaaagtgctgggattacaggtgggagccaccacacctggcctatcaggcctttatttagcagagagaagatattaaagcaacacacttttaagtttcttatgtattatttctcttttctttccacataggaaatggtctgaagacaatgatatagtgtgattccttgaaatccttcttgggcagtggaagggttcagattttttccctccaacttaatcagatgaagagtgagagtaagcagtatttaagagtacacagacaggcacacatatgcacttgtattttaaccaccagggccgtgtcagtacggaaagcatttaataaagatttgatagaccgacttttagatgctgaattacgtgttttagtggtaaagatctcaatggctttgtcaaaattctagtgagcttttaagtattttaagatgccaaatacttgctttttatctggaaaatgtttacaaatgtcttatggggatatatttttatttcaaaatttactatgaataaatattttgcaataaacagcaaccaaagtacatttgcttcaatttttgcagcaaaagatttcacaagagcaactaagaggcaactatttaaataataattatagaatctgcccataaaaaacacatataatacatacattttagagagacagggtcttgctctgtctctcaggctggagcacagtggtataatcatgggttactgcagctttgacttcccagactcaagctatcttctcacctcagcctcccaagtacctgggactacagcgaatgccaccacacttggctaatatttaaaaatttttcgtagacacggtctcactatgtttcccaggctggtttcaaactcctgacctcaagcaattctctcgcctcagtttcccaaagtgttgggattataggcatgaaccactgggtctggcccccaaaattatttttgatatagcattgtgttatcattttgcaaacatagttcaaattaaatcttcctaatgaatgtaatacattcattacaatgtaatacaggaatcactaacagcaaattcctgatgtgagggaaattttattcccataaagtttagttttctattaaagcttatcccaggatagtaactaactttcccaaaacacaaaaggttacttatttatttaggcgaagtctcgctctgttatccaggctggagtgcagtagcagatcttggctcactgcaacctccacctcccaggttcaagtgattctcctgcctcaacctctgagtagctgggattacaccaggcccagctaatttttgtgtttttggtagagatagggtttcaccatgttggacaggctggtctcaaattcctgacctcaagtgattcgcctgcctcggcctcccaaagtgctaggattacaggcgcaagccactgcacctggcccaaaaaggtttttttttcaatttacttaaaggaggtcaagcattttaaggcataagagccgtttatttaaaacagtaaattcagtacatttattcctttcagatcaaaattaacatattccgtattagtaaaataaataatgctatctgctttttttttttttttttttgagaaggagttttgctccatcctgcaggctggagtgcagtggcacgatttcggctcactgcaacctccgcctcttgggttcaagtgattttcctgcctcagcctcctgagtagctgggattacaggagcatgccaccatgcctggcttttttgtatttttagtagacacagggttttgctatgttggccaggctggtctcaaactcctgacctcaggtgatccacccaccttggcctcccaaagtgctgggagtacaggcatgagccactgccggcaggctgacaattctattgtttttgaagagggcgtttaatcactttattgtgacaaaattttgtttgtttgttttttgagatggagtctcgctctgttgcccaggctggagtgcaatggcacgatcccagctcactgcaacctccacctccccatttcgagtgattctcctgcctcagcctcctgaatagctgggattgcaggtttgtgccaccaagcctggctaatttttgtattttttgtagagacagggtttcaccatgttggccagcctggtcttgaactcctgacctcatgatctgcccacctcggcctcccaaagtgctgggattacaggtgtgagccaccgcgcccagccgtaacaaatcttttaactctgaaaaatacactatttgggatgagtcaccagtaaagtataattccatatgtagtagcataaaaaatgtctagatgtccagggtctcttctaaaattctatcactctggaagattaacaacagtcttactaaataactttacacatgaatgaaaaatggagaaaaattctattaagatgccaatcttattaaaatgaaatgggctattccctcctcccgccagaaaaaaaaaggctgggaaaataaaattcacaagttggtttttttcttttttctttttttacgagttggttttaaggttatttctaatattcatttttcctaatgacaccaatatatcgccatttacctgattttaaaactgcaactggttagttttaagtgaacacaagtgctatgtttttgtagctttaccatattcaatctgtaacttacttaataaaagaccttaaattcataatgcatgcacggtgatcaaaatatgagcactcctccaagctctgctactataacgtttgctcctttgggagcataatgatatggttttcttttttttttttttttgagacggagtctcgctcggtcgcccaggctggagtgcagtgatgcgatcttggctcatagcaacctccgcctcccgggttcaagcgattctcctgcctcagcctccggaggaactgggactacaggcgcccgccaccacgcccggctgattattcgtatttttggtagagatggggtttcaccatgttggccaggctagtctcgaactcctgacctcaagtgatccacctgcctcggtctccaaacataatgatctgttttaaggttgcaagtatttccattaggtatttatggggtgagtagggtggggcagatgtgtcccggaatggggcacagcggacaggaagtaacggtttataacaacgtgaacgcttctgacgtgtagcgggagcttcagaaagcgtggccgaatctgcagctcttaacaaatggctcgttcccaaaccttagcctcaactccttctgagcgataggggcatgctaccagcacggggggaaatgagatacaagaaacgcccgaaagggaaaaacaaggctgggctgtttccttcctttggggtcaagacagaggcacagaaggcccaggtctgggaggttggatcacctccggctggatgttgagccgggtgggagcccaaacagcagggggcccacaggaggccggcccaggcagcctcgcgtccacttaccaggccaggcccaggcacgtccccagcgacagcaggctcaggcacgttcgggggtctgcccagcccccgcctccgctgctccgggccacgggggtcttcccgccctcgctccgcttcccgggctccgcagcaggggctcccttgggccccgacttcttccggctcttcacctcagacatgtctggagaccctaggacgacaagcccagggcagcttcttcaccagggggagcaggacgtggccgccttggcgttcgtgggaaccctgggcggtgaccgcgccccctcacagacttggcaccgcccagagcccagccccttccctctccccggcatcctcgttgcttcactgagtctttcagctgccagctccatagttcccctaggagaggtgggcggcgacctcaacccacagcgccttccactgcgatattgctccaaatccgaggaaattcaaactcccgggcgcgcgcaggccgacgggacccgaggaggaggggcaggacgaaggggtcgcgcgcgccacgtcgggcgcgccgccgctgcccgagtccggcattggtgggaacgcggcgcgtccctgaggcttagccacgccccgtccgcggggtaggcgggcacttctacgcgcgcgggcatgagccgtggcaggagtgcgcggcggcagcggtggccgccccttggggcttggggtgtgtttatttgcataagcgggcgcgcgccgtccgggctgggtggatccggcgggatttgactgctccgctgtccagaggcggagaagaagaggtagcgagtggacgtgactgctctatcccgggcaaaagggatagaaccagaggtggggagtctgggcagtcggcgacccgcgaagacttgaggtgccgcagcggcatccggagtagcgccgggctccctccggggtgcagccgccgtcgggggaagggcgccacaggccgggaagacctcctccctttgtgtccagtagtggggtccaccggagggcggcccgtgggccgggcctcaccgcggcgctccgggactgtggggtcaggctgcgttgggtggacgcccacctcgccaaccttcggaggtccctgggggtcttcgtgcgccccggggctgcagagatccaggggaggcgcctgtgaggcccggacctgccccggggcgaagggtatgtggcgagacagagccctgcacccctaattcccggtggaaaactcctgttgccgtttccctccaccggcctggagtctcccagtcttgtcccggcagtgccgccctccccactaagacctaggcgcaaaggcttgggtaagttgacctcctcgcttttctccccgagccaggttctttggaggcttggtagctgatttcagggactgagaatttgaggacatggaatatttgataaccatcctgctcctgtaccaggaagagaaattctgtaatgaggaagtagtaaacttggggttttcgtggataaacgtgcgctgttttctgttttacgtccatgaagagttttggctttccattttgttgtgggttacaaaaggttttgagacttagttcagataagttgtgcagttttaaaacgtatttaagatttgcatattttagtttaacaggactaggtgaaattggaaattagtttcagaaaaccagagtgtcttatttgcttagctattggacatcacctaaaaaattcattcattcttgttttttcacatcgaatttcattactataaattaaggaacattttatgtttaagaggacaaaaacgttattaacattttaaaaaatgagagttttgattcgaatcaataactttttatcagttttgtgcccctgctgggcattttgtaagccttgacaagcataggcaaatgccctacgtccgtccctgtttttccaagtgctacatttggtgacttcaaaaacagtcattgaagcttgataattattgcccccttctgtgagctccaagttacttgtgctctgtttttgcacttcgggcattcacattcccactctctctctctttttcttctttgagtagactgtgaattatttcaggcaaatgactcaatcttttctgtagtcttggtgtctgacatatagggaggggcacaaatgtgtattgaatgaatgaattgataaacccgtttagactctttcactctatacattgtgtaaagttctgttaatgttttgaaaacttgcagatattgtgaactgggttttatgcccatggaaaaatttgcattatatttgaaataaagttgctagaaacgtcaagtattttactataaaggctgttattctttcctcatgtcctcctggtctgagaaatcacatcagaaagtgtttcctgttgctttgtgggaaatgtgtttagcaaggaggacctagagctgacatcctccttgaacgagaactaatactcaatagtaacaatgctctattcactcttatgtttgataaggaaaacaagaagtctcttaatattaggacttcaatgtaatcactattttatacaatcttaattaaaaaaggaagtattttattgtaagaaatgataatgtgtgctaaaaaaaattgacagtagaggccgggcatggtggggctcacaagtgtaatcccagcactttcggaggctgtggcgggtggatcacctgaggtcaggaattcaagaccagcctggtcaacatggtgaaaccccgtctgtactaaaaaaaaaaaaaaaataagacaaggtgggggagaaatcccaaattttgctactcagaagtaactcaaacatttcgatgaataaacttctaaacgtctatatatattcatatgataccaacacttgtttttttttttgagacagagtctcagtctgtcgcccaggctggagtacagtagagtggtctcggctcactgcaacctctgccgccctggttcaagcagttctcttgcttcagcctcccgagcagctgggattacaggcacctgccactgcatctggctaattttgtatttttagtagagacagggtttcaccatcttggccaggctggtcttgaattcctgacctcgtgatccacccgcctcggcctcccaaagtgctgggattacaggcatgagccactgcgcccggcccccacgttatgtgttgtatgtgggatcatgtttctgttttttttttttttttttttcagcaacagtattatgaacatctttccatgtcaatacatggagatatgtgtcataattttgaatggctgcataatattccattttatatacataccctaatttttaaaatctatattcagaatgatggacatttaggttgcgttcatcactgaaacatcctccattaattcttttttctttttattttttactctagcctcccaatgtgctgggattataggcttgagctaccacacctgattggaaactcattaattctccttgtggatatttttacatatgtatttgaatgtctccttgaagtaaatccttagaaatgggatttctgggttagagagaaagcttattttaaacaattccatatcttactgctttccagaaaaattgcattcattttctagtttccccaattagtgcataagaatggccattttctcatacctttccaagcactgggttttgtccatttaaaaatttttgccaaggaaaaaaaatcagttttgttctttttacgtttcttgtttattagtgagattatgtatcttttcatatttttattggcctgacaaatattttggtgttttggctgtagc

SEQ ID NO: 57 - DNA, 6523 bp, Homo Sapiens
gctggaaggagtgctttgacaccaggcaggcgcgggccattgagccccttgggactcaaacaggatgtgtatgtgggaggagggaatgggtgggaagaacctacgtttggctgagtcctggtcagctcgaggtgatccttcagctctgggctgcaaggcccaggcccctggtgctagcggagaaggagagaatgagggagttcaccgattcctaaggcgcacgagtgaagagcatagagtgaaggcctggtttctcatggcccttgctccagctcaagaactcgcacccacgaataggggagcgctaggggaggggcaactctgggccgtgcctggagtgcaggccggcagggagcaaagccacctttgtcactgcccctcctggagcaggaccttcaggtttcctgtttggaggaggaggggcggggaacccgcaaaattcaataaagcaaaaaggggaggaggaaggaggggacctggcggggcctttgaggcggcccaagcattagtgtccctactctggcctgatctgctcgccactgaaagggccgtgcccgccgctggcgttcgggaagagagccgggccggctagctgtgcgcgcccattaatctgccgggcgggcggcgggcgggcgggctgggggctgtttgtaactttgctgcctcggtcgccgcggtccccggggagcgggctccggcgttcgctcccattggccgccgccgcgtcagctggtgcgatttgctgctgtcgcttttggcgttcggccatccagaaacaaaccagttcgatgactactaatagttatagccagatgtactaatacacaacaaatcacagtcctgcagaggggcgcgcaaatgagttcctattttgtgaatcccactttccccgggagccttcccagcggccaggactccttcttgggccagctgcccctctaccaggctggctatgacgcgctgaggcccttcccggcctcgtacggggcgtcgagtctcccggacaagacgtacacctcaccttgtttctaccaacagtccaactcggtcctggcctgcaaccgggcgtcctacgagtacggggcctcgtgtttctattctgataaggacctcagtggcgcctcgccctcgggcagtggcaagcagaggggccccggggactacctgcacttttctcccgagcagcagtacaaacccgacagcagcagcgggcagggcaaagcactccatgacgaaggcgccgaccggaagtacacgagcccggtttacccttggatgcagcggatgaactcctgcgcgggtaagacatatcccaagacagtggagggagaggggaaaggaggcaggaaaagaaagaaagaaggaggaaacagagtagaaagaggaatagagagaaagaaaggatgaaagaaccagcaaagtttctttggcttcttaaaagagaagaaaaaatcagttcccaatggggctatcaggccatggcagaggaagggcaaggccccagtgtccatgtaagctgacaccttaggggaggatgggggcactggcacgtatatgagacctgtgacagggacagcctgaagagagagagaggctggtggggagggacagcctgtccatgcaccctgagtaccctgctcagcttcccaagccagagggccttttgcactgcgtcactgataaataccctttgcttcccaaccccctctcctttctgcccttcagaaacccgtacagagaggtggccatttggcctcttccagtgtctccccaaagccttggagggccacagccccagactcaggatttttttctctctcctccctcatctcccccggcttctactcaactgcccactcttagccaacttctgccctcttctgagcccatgcctgagcttcatacacctgtcttggagggaccccccaccacccttggggaactttggcaccagatcagacagcccaacacaatcctacattgccagaaatcctagactacctatagctccatctcttagcctctggtttccaaggactccacagggaatcccaaagactcctaggaattccctaggacagagcctaatgcggattgttaaaattataatgttttccattaacatccactttatccttgggggagttctgcatttctcagaagggtcatataatttgggagaatgtgtaaagattcaagagggctgaccatttttaactcttcaaaaaatgtgttgagttccgacatggctggtcacagtagcatcctcagagagaccactatgaattcagagtgtgtacactacttacatggttccacaccacccaccccagacacacacacacacacacacacaaacacacacacacaccctgcatccccacaaaaacacgacctgggcatcccaaattaagaatgctcattctgttattttgcttgtaatggttttcctatgaggcagatttttcaaaaacgataatgtccaccccaagtcgttataggtggaaaacatctcgcttggtatgaaataatctcccattcagtatgctttgggccccagacatagtgggagaggctggagtggaggcggggtggtttctagtctgggtgcctcttgtgggaggcactgggctgactgggtcaaccctccaggccctggcttaccggcgcccggccgtttctgctcgtaggtgctgtgtatgggagccatgggcgccgaggccgccagacctacacgcgctaccagacactggagctggagaaggagttccacttcaaccgctacctgacacggcgccgccgcatcgagatcgccaacgcgctctgcctcaccgagcgccagatcaagatctggttccagaaccgccgcatgaagtggaaaaaggaaaacaagctcatcaattccacgcagcccagcggggaggactcagaggcaaaggcgggcgagtagatgcctgggcagggaccaggccagcgctgcaacctccttcggctttgcccccttgccctcgcctgttccccaacttttctccccgcctgctcccatctgggggcttccgcagcttcaggggagcccggagctttgcaagcgtctgtgcatttatttcttacaaaacaaaacaaaacaaaacaaaacaaaacaaaacaaaacaaaacaaaacctcacacacagccaataccagcggtggagcggggcgcactgcacacacccagtcccgctccacaaggatgcccaaaccggctccggagttctggggtgcgccctgaatgcgtctggggctcctgtgctagtgtctctgagctccccgacctcgggacgcggggctgctggggaggaaagagccctgggccgagccccgtttcgtgtctgggcgtctctgcctaagtccctcgccagtaagtcccgaagggcatcatcaaatcatctctggccagtggaaagagggggtctaagagctggagcccggccttgtcgcggcctcccaagccgcctcccagaacaggaaggaagctcgaggaacaaagggggccccaacagagcccagtctctcggtcccgcgtgtgcaaccgtcagtggaagagaagcagcctcagccgaggcgagttaacctgggcgcgggtggaacattacagcccggggtaggctcccggctccggattcccgctcccagcctccgatagcgcccgcgtcgccgccacagcagcgttcaggacccaacgaggggcccagggccatgggagccgccagagtcctggcttccagacgtgccaggggcgcctgcaacgccgggcctccagcggggagactccacttgcctctcagctatatttgtgatttacttgagtctttcggagccgtggaaaataactacagagatactaggcactgccaaggaatgcttccattatcgccctcattttactcctggaggtctaagcaagaccccagtaacccgccccacggatccccagaccccaggcagcctctgtggctgcagggagcctgggcccactcgctgggttcaaggagaaccctccgacttggggcccggctggctcgaggaaccggaccctgtgatgaagattttccaggctggatacgtaagcaaatcaaatcgcaaactaatgacacgaaaaccatattcacacgaaagaaaaatcgactacggttataaaagtgtatggaatttgacctcgccttggagaaacactacacaaaagctatctttaatagacgcctgtcatttaagagcggcagggacactgtccctcatgcgctcgcaaaaacagagccgtaattgtagctgctgctgctgcgggcaggatttatttctccaattggctaaatggctttcccccttccccgaaggtgatatctgtattttcaaaattcagagctgctggcaggacggtcagtaccgaccccaacctcgacacaaaaataagaggggctgcaaaacgggggaaataaagttgttgtaaataaaatgcaagtcaccacctccccccaatcctctgcatcctcgccgggcgcgcgatcggcagctgacggcctaacaattggtacatcctaatggaactgcgagggaaatgcaataattttgccataatgggctgtaacctcaattcgaccccggcccttgcagcccccggtcggaagctgggcgatgagccctgcctccagcgggtggcgctcgagtccggctgaacggcggcaactggcggcgggcacgcgcccggggcgcgcgcgccacccccctcgcctccacccaactcccctattagtgcacgagtttacctctagaggtcatcaggcaggatttacgactggacaacaaaagcacgtgattcgaagtcgtaccccatatttgggtgcctacgtaggagggaaccaagtacatgtcccagtcatttccataattcatcataaattgtgcaagggtgctatagacgcacaaacgaccgcgagccacaaatcaagcacacatatcaaaaaacaaatgagctcttattttgtaaactcattttgcggtcgctatccaaatggcccggactaccagttgcataattatggagatcatagttccgtgagcgagcaattcagggactcggcgagcatgcactccggcaggtacggctacggctacaatggcatggatctcagcgtcggccgctcgggctccggccactttggctccggagagcgcgcccgcagctacgctgccagcgccagcgcggcgcccgccgagcccaggtacagccagccggccacgtccacgcactctcctcagcccgatccgctgccctgctccgccgtggccccctcgcccggcagcgacagccaccacggcgggaaaaactccctaagcaactccagcggcgcctcggccgacgccggcagcacccacatcagcagcagagagggggttggcacggcgtccggagccgaggaggacgcccctgccagcagcgagcaggcgagtgcgcagagcgagccgagcccggcgccgcccgcccaaccccagatctacccctggatgcgcaagctgcacataagtcatggtaaagccagcctttttctaaatccacgcgaccgcggggacgcggctctcggtcccccctctcttctctgccgccctctcccagtctctcttggtctcatttctcccagccctgcggagctctccttgccgttctccctcccctgccttcctccttcctcctcttctttgcgagcaccctgcgctcacaaatagtgggggaaatgggcgttctctgggacagtttagacgttggaagggggaggaagcaaaaaacccctctggaaccccacgccttgggacgcgctcccgggtcaggccagccgagcaaggcgcagagaggtagaggatggctgtagcagccgtgaatcgggcttgtcacggcggataatttatgaggagggctacgctggggaaacagcgttactaattacagcccccgaaaaggggcttgggggaaagaatcgaggcgagagcctgcaggattctgaattttgggggcaggagggagagagaaggaaagggaagaaaaagaaaacaggctccccaaccctgcaggctggaaacgggaggcggctctcggggctggaactttgagggagggtgacccgaaggccacttgggcgctcaggaaagggccttgcttcctgggtttctgtgcggtgggcagcctgggagggctgtgcctcccgatcggggcgcccggggcagggcggagggggcaggagaggggccagggaaagccggagtccgccgggacacggccccagcctcagatgggcagattgttcccagggtccaaatcgtattgttttctttctagaaaggaagagagaaggaaattcgggaggggtgtgcgggctggtaggcagaacttgttgagcttttcgcctgggttccctgctcatgacccaagcttgtccccctggcggactttggaagacaggagttggtggctaaaccgctgacttttctattgcaga

SEQ ID NO: 58 - DNA, 10224 bp, Homo Sapiens
agcccccacagccccagtaccgccctccccatcctaccccgactgcgtccctgctgtttatctttgcccacccacctcaaccccagtgctcttttcagtccttgggcctcaggtgacacaccagctagtgggacatgggcccccacaggcattctcagcccaacccagccccttccttttccttggccccctggccagcacctgcatcacactggcctccactggacacccttgcagcttcgggccttcctcacagacacactgctggaccagctgcccaacctggcccacttgcagagtttcctggcccatctgaccctaactgaaacccagcctcctaagaaggacctggtgttggaacaggtaggcactggaaagttagctgctcaggaccactgtcccactttaccagcaccttcctgccactctccacttctctctcctagatcccagaaatctgggagcggctggagcgagaaaacagaggcaagtggcaggcaattgccaagcaccagctccagcatgtgttcagcccctcagagcaggacctgcggctgcaggcgcgaaggtaaggcctgtggaaatggcagggagggtggaggggatgcaggaggcatggatgtgggtggggtgcccccaccttccagggccagtcagaccttcctgactttcccccaggtgggctgagacctacaggctggatgtgctagaggcagtggctccagagcggccccgctgtgcttactgcagtgcagaggcttctaagcgctgctcacgatgccagaatgagtggtattgctgcaggtgagggtatcctagaaccttggacctctaagccctactcccacatcccccacatgcattgccatcctcaatacccacctgcctgcagggagtgccaagtcaagcactgggaaaagcatggaaagacttgtgtcctggcagcccagggtgacagagccaaatgagggctgcagttgctgagggccgaccacccatgccaagggaatccacccagaatgcacccctgaacctcaagatcacggtccagcctctgccggagccccagtctccgcagtggagagcagagcgggcggtaaagctgctgaccgatctccctcctcctcaccccaagtgaaggctcgagacttcctgccccacccagtgggtaggccaagtgtgttgcttcagcaaaccggaccaggagggccagggccggatgtggggaccctcttcctctagcacagtaaagctggcctccagaaacacgggtatctccgcgtggtgctttgcggtcgccgtcgttgtggccgtccggggtggggtgtgaggaggggacgaaggagggaaggaagggcaaggcggggggggctctgcgagagcgcgcccagccccgccttcgggccccacagtccctgcacccaggtttccattgcgcggctctcctcagctccttcccgccgcccagtctggatcctgggggaggcgctgaagtcggggcccgccctgtggccccgcccggcccgcgcttgctagcgcccaaagccagcgaagcacgggcccaaccgggccatgtcgggggagcctgagctcattgagctgcgggagctggcacccgctgggcgcgctgggaagggccgcacccggctggagcgtgccaacgcgctgcgcatcgcgcggggcaccgcgtgcaaccccacacggcagctggtccctggccgtggccaccgcttccagcccgcggggcccgccacgcacacgtggtgcgacctctgtggcgacttcatctggggcgtcgtgcgcaaaggcctgcagtgcgcgcgtgagtagtggccccgcgcgcctacgagagcggaaggggcagccaaggggcagcgcagtcgccgcgggtcaagtcgcggcagagggggtcggcggggacagctcccgaggactaggtccgttactttcgccccatcgctgaagagtgcgcgaaaatggtttatcccttgtcgcactccactcgtatctgggccacagatgagcagaggtggctgcttatatgtaaaaatacgctgattttaagtttcttatctttaaaatgccttggcccttcttgagaaagggtttgtgcctactgtcctcggagtccatcttcccaggcttgcctcttctcaaacactcatgaccccctccagaacctttagggtgaagggaaattaccacctatgggagggagcctggaaaaatttagaacctttggtgggccccctgcaagcaggagttttgttgagtctttatttagcaaacacccttttctgacccagtgaatcagatgctaaaatatgcacgcagccacacacccagcagtccttctgcacccctgggaatcgccagcaagcaaaggttgctctcccctgggtagacaccagctggaatcaccaggggtgcttttacagtcctccccgctagcctggatcccaccgcagacctgttgaatcaactgctgggagtggaccctaggcatcagtaaattttaaaaactccccaaattattgtaacatggagtctgggttgagcatcactgctctggcctatttaggaacttgtggatggatagtgtcccaggtctgtgtgtgcatggagaccctctcatccggtacaagaggacatcacaaattcagctggggggagcacaaagttgtgacagaatgcaaagaatgaacaaggggccgagcgcggtggctcatgcctgtaatcccagcacttcggaaggcggaggcgggtggatcacctgaggtcaggagttcaagaccagcctggccaacatggtgaaacctcatgtctactaaaaaataaaaaaaaatgagccaggcgtagtggcgggtgcctgtaatcccagctactcgggaggctgaggtgggagaattgcttgaacacaggaggcggaggttgcagtgagccgagatcgtgccactgccctccagccttggcgacagagtgagactctgtctcaaaaaaaaaaaaaaaaaaaaaaagaacaaggctgggacattgcagcgttctcaaagagaaataaagtagccatggagataagaagcaggatgatttgggcatgtttatcagaggtagagacaagggagaaatcaaagataagtttgggcttttgtctccagtaactgggagcctagtggccatttttgctgcaaagaggaagctgggcaagtgtagcagtgaggctgaagaaaagggaattaaattttggccatgttcacttgaaacgtcttttagacatcctagtgaaggtactggcacggaggatctagtctgagggtttaggtcagtgtttcagccgtggatctggggcagatgaatgtagacagaccaggccagtgatcaggactgagcccagacttcatcgtgagatatggaagttgagtcagaatctgcaaaggagctgagcaggagctgcagggggtaggaggaaaactgggagagtgtagcccctgggagtcaaagggagcaagcttcaaatgatgctgagggggtgagaatggagaatggaacactggattccatttggtagtacacagatcgctgaggaccctgtcccgggcagtttcctggaggaagaggcaagcctggctggagtgggtagaggggagagtgaaggcgaaggattagagtgtatagagaccagtgtcttggtctgaggggagtagagacaggtgacaaccacagggcagacgtaggttaaaggtgtttagtttttccttcaagtaaatgggcagatgtattccatatacgttcccagtgaagggccgggtgcggtggctcaagcctgtagtcccagcactttggaaggccgaggcgggtggatcacctgagatcaggagtttgagaccagcctggctaacatggtgaaaccccgtctctactaaaaatacaaaaattagctgggcatggtggcgggcgcctgtaatcctaggtactcaggaggctgaggcagaagaatcgcttgaacccaggaggcggaggttgcggtgagccgaaatcgcgccattgcactccagcctgggtgacaaaagcaagacgcagttttttgttgttgtttttttaattgccaatgaggaaaggggaagttctgtgctaggcgatagagatccaactgttgagcaggcctctctgcctgtggccttccggccggtttccagacgcccaggtggccaacattagagtccgcgtagcagtgtgaggtaacccactgagataggtcgggcctgcggagcctggcgagcagcggccctctccctggggcttcccttcaatctccgggacatttccccgacctggagctcctccgcctcaccgccaggcctctctgcagattgcaagttcacctgccactaccgctgccgcgcgctcgtctgcctggactgttgcgggccccgggacctgggctgggaacccgcggtggagcgggacacgaacgtggtgagcgcggggccgagggcgtatgggaagggcgaggatgggcaggccacagtgcaggcattctcgagggctgcctgggtgccgcgcgcaaggagcgttctaattgccgatttcccggcggcacagagaggctaattctgcgcgggggctgggaggggagcctggattgccggctccgcaagtactccacccgctgcaagcggacccgggcccaggctgacccaggctccgcgcacgcgcacttcccgcaccttcccgccctcgcctccggccagaggccactcttgtgcgcttgcccggacgctggcacccgcccccgttccctgtggtaggtggggtctgtgagtggagctccggagcgatgaggtcattcctgggggcgaagcgtgcgtgtccccgccccggcgttcctgccccaatgagacaagagctagatcccggcgatctacgtttcagtcttaacggttgcggcgcggctctggcccgggcgcacgcgcacactgacacgcgtacacgcacgcacgcgaccggggcggtggttggcggctacggacgcgcaggactgggggacgggcgggtacggctatgggcgaggcggaggcgccttctttcgaaatgacctggagcagcacgacgagcagtggctactgcagccaagaggactcggactcggagctcgagcagtacttcaccgcgcgaacctcgctagctcgcaggccgcgccgggaccaggtgggagccagggggtgccggcgggcgggaggggaagcggtcgctggagctccgccctccccggtccgttgccgcgtcctgggtcggtgggcagccccaccctcctggctacgtggctccccgcgggtcctggccggggacctgcccgcggaaccgtgcgtaagaccccgattccaccgcctagatgctgggtgccggggcccccttggtttctgtcacagacaggttgaacacggaaaaagcagctgtatggcttgtggtagacctgagccgggcattatccagctatgactaaagccgaccgagcagtttggactagcacctcgatttccgcgttcgaatgctcctgctccctccttggggagactaggggaggatgtggagagggaagagtcctcgccaggaattgagaagtatgtttaggaaaacttgagaggcagagagagatcctgctcctccatctgcactcctgtatggagccagctgagccctcacctcttccctgttctggcctgtcaccagctgctggaatgtggaagattctgttcccttcctctagggtggatctggagaaagatttgggaatagataggaaagaagtcttgttttggaccataagcattcaggagcactttacccacaggaagggggaaagctagattataaaatgcctaaagaggtggaaaaagagatccaggttactaacccaggactgtaaggtgtctcggaacctcctaggtatccccattatcggagaactgtgtgccagatgccattggtgtgaccaccaggctcagagaaccaggcctaggcaccaggaaaaagaaacagggactgtgaagctcagtatgcctggcagaaatggggcggaaatccttatttaagtaaagaaagtggagttgtgagtgatgcttcagataaaattttacaaaattccttacaaaatgggtggtgctcagcacgccaaaatcttagcccagagcttgggtgcaagggttgagttgagtgtagacccctgggcttgtcttcatgtcagtcagtcctgagccattttccactgtggaaaggtgggaaaaccacaagacactaaccaattgaaaaggagggctagccacggaggtgcacacctgtaatcccagctacttgggagggtgaggcagaaggatcacttgaacctgggaggcagaggttgcagtgagccaagatcgtgccactgcactccagcctgagtgacagagtgagactctgtctcaaaaatagaaaaggaagccaagtacggtggctcacacctctaatgccaatgctttgggaggccaaggcaggtggatcatttgcaatcaggaattcgaggtcagcctggccaacatggtgaaaccctatctctactaaacatacaaaaattagccgggcatggtggtgtgtgactgtagtcccagctacttgggagactgaatcacttcaaccgggaggcaaaggttgcagtgagccaagatcgtgccactgcactccaacctgggtgacagggtgaggctctgtctcaaaaaaaagaaagaaggctgggcttggtgactcatgcctgtaatctcagcattttgggaggccaaggcaggcagatcacttgaggccaagagttcgagacctgccaggccaacatagcaaaaccccgtctgtactgaaaatacaaaaaaattatctggccatggtggtgtgtgcctgtaatcccagctactggggaggctgaggcaggagtatcacttgaacccagaagacagaggttgcagtgagtcgagactgggccactgcattccagcctggatgagagagcaagactctgtctcaaaaaaaaaaaaaaaaaaaaagaaagaataggaggctgagaagtcccaagttatatgttaaaaaaaaagaaaaaaacatcagttttaggccaggtgcagtggctcacacctttaatcccagcactttggaaagccgaggtgggtggatcatgaggtcaggagttcaagaccagcctggccaaaatggtgaaaccccgtctcgactaaaaatacaaaaaattagccagttgtggtggcaggcacctgtaatcccagctacttgggaggctgaagcagagaattgcttgaacccaggaggcagagattgcaatgagccaagatcgcaccactgcactccagcctggaaaacagagcgagactctgtctcaaaaaaaaaaccatcagtttttatggacagtggtagagtggagggtgggtccctatggtgcagaagggaaattccatggtcctgctgtgcatccgactgggatggctgttgaaatcctcttccagcaggcagctttggaaacagaaaaagaaactcttcctcctttagaatcctggaagggctgtgcagtgcctctaatccaagtctgttttctgagtgaagatagggaggttcatcaccagaagggaaggggctggaaatgaggtcactgcatcccagcccagggctcctgggtcatccaggaagggaagaaggagcaagctttctcattgttaggtaggagctcagagccatcacaagaacaagttagcaccatccctgtgccctccctgttctgcaaacaaaatgatcttccttcttgccctggcactagagtctgtctggcatttctcctgcccctagtactcctcccatctgggtacttcttcccgttggtgtactgaacaaacacatccactgctttattcacagcctccagccctcattttccagggcccacaccatttgtttttactaacccgacaaggttgcccactgtccccagtaaggtttgtactggggtttttactccagtgctcttctccatccaggagacctttggatacttggggaagaaaatgagcttaaattcccacccctccccctttacctttttcctgtaaggccctggccttagttcttagccccacatccttgctggctgcagaatagcagcgggttctgggtaaggagcattctgctaaaacgctccaccctgctccctcatctgtcctctccatttgtccccatcagatggtttaagtgcttaaggggactccagggcggagtcagggagaaccctggctctcctgggctaggcacaagatcattctacaggaaaccttgtgggaattcttctgggacaaagtattggtcagcgctgagcttagctgtgtctgtgacactcgcattctaactagggcctatctgacgtcaacaggaagtaaggctgatgcagtggggccaagggagtctgggagaagaaagtcggttcagagccctggctgccctgtcccacactccacccttccggcaagaatccagtccctagatgaggtggggagtgagtggtcgagttaaaaatctctgggtcgggtacgatggttcacgcctgtaatcccagcactttgggaggtgaaggcaggcggatcacttgaggtcaggagttcaagaccaacctggccaatgtggtgaaatcccatctctactaaaaatacaaaaattagccgggtgttgttgtggcacgcgcctgtagtcccagctactcgggagtctgaggcaggagaatcgcttgaacccaggaggcagaacttgcagtgagccaagatccagccactgcactacagcctgggcgacagagtgaggcttcgtctcaaaaaaaaaaaaaatctttgggccaaatctccagacagcacaggcaggtgcagaaacccaccaggaagctgcctgtgtacctctggcagattggagcctggcctaaagctgccttttatgcagcttgggtcaaggttaaacatcatgtcacagtgatttttctcactatgtgtgagacatggagaactggctccaagtactactctgtccactggtggctggactactgatgtgcaccactctccactcctctcaccctgcagtgggtcatggccccgtgccggggcagaggagaaaaatgggctgccttctccaggacaaaccctcactccaactcaactagggtgctgtgatcagaatgtgcaattgaggtgtgattttactgattttttttttttttgagaccgagtttcgctcttgttgcccaggctggagtgcgatggcacgatctcagttcactgcaacctccacctcccgagtttgagcaattctcctgcctcagcctcctaagtagctgggattacaggcatgtgccaccacgcctggctaattttgtatttttagtagagacggggtttctccatgttggtcaggctggtctcaaactcctgacctcaggtgatccacccgcctcggcctcccaaagtgctagaattacaggcgtgagccaacgtgcccagcctgtttttgttttttgtgttttgaagcagggtctcactcagttccccaggctggagtgcagtgacacgataatagcttactgtagctgcaatctcccgggctcaaacgatcctcccacctcagcctcctgaacagttgggactacaggcacaccaccacacctggctaatttttttttttctttttttagtagagatgaggtcttgctatgttgcccaagctggtctcaaactcctgaggatcaagtgatcctcctaccttagcctcccaaaatgctgggattgcagatgtgagccaccacacccagcctgattttactttaaatgagagtccctcttcagagtccctcagctgttcctggcccctggccatgtgccttcagttgcccctgcttctgtggtatccttaaggctacattcagtgctgaggccctaggcaggcagcagagagaagccaaatgattctgtctttcccttatccacccagagcatgcaaaaccaggagcagtggtgggttcagggtgggcaccagctatgtatatgtacatcagggacagggggccaaaggcagtcagtttccaaagactgccccagaggccatttttcagagaagccctgggttcctcaagggccctgtgtccatgctggcccatcttgcagg

SEQ ID NO: 59 - DNA, 18 bp, Homo Sapiens
gagcaggccgaacgctat

SEQ ID NO: 60 - DNA, 18 bp, Homo Sapiens
atgcaaaacgagggagcg

SEQ ID NO: 61 - DNA, 18 bp, Homo Sapiens
aaaagcaacgaggagggc

SEQ ID NO: 62 - DNA, 18 bp, Homo Sapiens
taggccatcggtgactgc

SEQ ID NO: 63 - DNA, 18 bp, Homo Sapiens
atgaagaacggccaaggg

SEQ ID NO: 64 - DNA, 18 bp, Homo Sapiens
tacttgggcgggtgagtg

SEQ ID NO: 65 - DNA, 18 bp, Homo Sapiens
ggagccttcggctgactg

SEQ ID NO: 66 - DNA, 18 bp, Homo Sapiens
cctgagagcgggtgggag

SEQ ID NO: 67 - DNA, 18 bp, Homo Sapiens
gagggatcgcgctgagta

SEQ ID NO: 68 - DNA, 18 bp, Homo Sapiens
cactgtcccggctgccag

SEQ ID NO: 69 - DNA, 18 bp, Homo Sapiens
gtgggagcggaagcctga

SEQ ID NO: 70 - DNA, 18 bp, Homo Sapiens
tagcagcccgggtagggt

SEQ ID NO: 71 - DNA, 18 bp, Homo Sapiens
gtgaagctcgctgctttc

SEQ ID NO: 72 - DNA, 18 bp, Homo Sapiens
ctggctctcggaagcgct

SEQ ID NO: 73 - DNA, 18 bp, Homo Sapiens
agggaggccgttggcacc

SEQ ID NO: 74 - DNA, 18 bp, Homo Sapiens
tttgaccccgaggggagt

SEQ ID NO: 75 - DNA, 18 bp, Homo Sapiens
ggtgttcccgtgtgagat

SEQ ID NO: 76 - DNA, 2932 bp, Artificial Sequence
  chemically treated genomic DNA (Homo sapiens)
gttaagaataaaatatattaagataaggaaaatttgtagttaagaatagaaaaaaattatggttttgaagtatgagttatttaaagaaagtggaaatatttttagattatgtagtaaaaaataaagtgattttttttttttaaatttatgtaataaattgataggtaatatgtgaaagttatagaatgtagattagaggatataataaatttattttttttatgtttataagaagtaagaaaagttttgatgtgagttagtattgttttataattttgaattgtgtagattgtacgtatttttttttagtttgaagtaaatagtggataggaaaaaatattaaatgttggtagtaaatatggaaggaaattataattaatgtaatatgttaaaatatgttatgtttattttattaatttgaattaaaatgtaagaatttaaaatgttttggaaaaatacgggtattgatttgacgtttgaagttttaaaatattatatattttgaaatagtatttgtattttgaaatatttgtttttatatattttttaaaatttttttttttttttattttatttattattaaataaaggatgaatagatgtaatttagaaattgttaagtatgttgaagaaagattattgtagaaaaattttttttagtttttttaaaggtgttaggaagtagaaaggtgatatagaattggagaggtcggagtttttgtattaattgtattaaatgcgaatttcgagaaaattttttttaattacgttttgtagttatatggatatgaagatttatgtgaattttgaaagacgtgtttatataagttgaaatgtttttaatgatttagttgatgcgcgtttttttatttgttttttttagagaggtgtaacggaagttagaatattttttttggaaatttaatttgtttcgtagtttttcgaggaattagtatttagttaattcgggtcgggagtagttatttgtggtgaggttgattggttgggtaggaatagcgtcggggcgtgggttgagtatagtcgtttcgttttttttgttataggaagtttgagtttattcgagtagcggtttttttaagtttaaagaagtagaggtcgttgttcgttttttttaggtttttttattaaagtcggagtatttttttttaaaattttacgttttggtggtcgttttaaggagcgcgaggtaggggtacgtaaagttgggagttattatgggatagtttttaagtgttaggtttttagattttttgaatttggtttttacgggagaagggttttttgaggcgtggatagtgtgaagttttttggtaagtttatggggattaagtggggttagatttagatttaggagtttttggagtagcgtttaaatcgtagtggtattggattatgttgttcggagcgcgtatagttcgcgcggtgcggggatttgttttttgagttcgcgggcggtgggtgggaggaagtatcgttcgcggcgattggaatcgggagggagaatcgtattggcggcgggtaaagtttagaacgcgttgttagatttttaattttgttttcgtggagatgttggagatttcgcgtataggaaagtttttgtagtgtttatcgcggttagagtagttggggtattaacggcgggcgtttttttttattgttttttggtttcgacgggggattagaggttagttttatttttagcgcgtttgaggtttatgtatttggttaatgagttgcggtttttttttaggtcgggatggattttgaaggggatcgtaatggaggagtaaagaagaagaatttttttaaattgaataataaaaggtaattagtttgttttatttttatagtttatatagttgcgagatttgagtaatttatttttagtttttagttttgaaataaatgatatgttgttgtttttaattatttttaagaaacgtaagttagtttttggaattaatatttttgtttagagtagaagtttgttggttgagtggagtatagtatatgtattttttttgttttttttgtttttttttttaatgatatataatattttatatatttatgaaatggggtatatggaagcgttttttatatgttcggaatgtgtaatgattaagttcgggtatttgaaggatatattattttaggtatattttatttttatgtgttgataatattttaagttttttagttattttgaaatatataatatattgttaattgtagttattttcgtttgttatcgaatattggaatttatttgttttatttaatcgtttttagttatttattaatttttttttattttatttttttatttttttcggttttttttttttagttttggtgtgttttttttttagtttttttgttttagataggcggatgtttatatgtgtttttgttttatgaatttttgttttttaagtggtgttggtcgtttatacgtgagttatatgttgttggtgatttgttttgtggtttaggtttttgttttcggtaaatggttatgtaaatatcgcgtttgtggtttggttgatgagatagaaggttaaaagtatatttaggttgttaattggtaataaatatttgtatataatattggtaatgtaattatatagggaaaataattatttaaagtaaattttgattatggtgttttgtttttatagaatatttaaaattttattaaatagatttattgttagtagtaaattgtaaaatagattagtaagtttaataatattagaaattgtaatgtaaattataagataaattagttaaatatattaatattataagaaattaagttttttagtgtaagagaaaaaatataaatgtggaaattaaatatatttttaaaaataatgttaagtttgaattagaaattttaatatgaatt

SEQ ID NO: 77 - DNA, 2932 bp, Artificial Sequence
  chemically treated genomic DNA (Homo sapiens)
aatttatattgaaatttttaatttaaatttaatattatttttaaaaatgtatttgatttttatatttgtatttttttttttatattgaaaagtttggttttttataatattaatgtgtttagttaatttattttataatttatattatagtttttaatattattaaatttattagtttattttataatttattattaataatgaatttatttagtgaagttttaaatattttataaaggtagagtattatgattaaaatttattttaaataattattttttttatatgattatattattaatattatatatagatatttattgttagttaataatttaaatgtatttttgattttttgttttattagttaggttataaacgcgatgtttatatagttatttatcggaagtaagagtttggattatagagtagattattagtagtatatggtttacgtgtgggcgattaatattatttgaaaagtagaagtttataagatagaaatatatatgagtattcgtttgtttggggtaggaaagttgagaaagaggtatattaagattaagggaaagaggtcgggaagggtaaaaaggtgaaatgaaaagaggttggtgaatgattaagaacggttggataggataaataagttttaatgttcgatagtagacgagggtgattatagttagtaatatattgtatattttaaagtagttagaagatttaaaatgttattaatatatagaaatgaaatatatttaaggtgatgtattttttaaatattcggatttgattattatatatttcgggtatgtaaaaaacgtttttatgtattttattttataaatatgtaaaatattatgtattattaaaagaaagaataaaaaagatagggaaaatgtatatgttgtgttttatttagttaataaatttttgttttaagtagggatattgattttaaaggttagtttgcgttttttaaaaataattaaaaataataatatgttatttattttagagttggaggttagaaataaattatttaaatttcgtaattatgtaaattatgaaaatgaaataagttagttattttttattgtttagtttaaaaaagttttttttttttgtttttttattgcggttttttttaagatttatttcgatttgaagagaaatcgtagtttattagttaaatgtatgagttttaggcgcgttggaggtgagattaatttttagtttttcgtcgaagttagagagtagtaagagggagcgttcgtcgttgatgttttagttgttttggtcgcgatgggtattgtaggggtttttttgtgcgcggggtttttagtatttttacgaaggtagagttgggggtttggtagcgcgttttggattttgttcgtcgttagtgcgattttttttttcggttttagtcgtcgcggacgatgtttttttttatttatcgttcgcgggtttagagagtaggttttcgtatcgcgcgggttgtgcgcgtttcgggtaatatggtttagtgttattacggtttgggcgttgttttaggagtttttgagtttagatttaattttatttggtttttatggatttgttagaggattttatattatttacgttttaagaagtttttttttcgtgaagattaagtttaggaaatttgaaagtttgatatttgggaattgttttatagtagtttttagttttgcgtgtttttatttcgcgttttttggaacggttattaagacgtgaaattttggaagaagatatttcgattttagtggaaagatttaaaggaaacgaatagcggtttttgtttttttgagtttggaagagtcgttattcgaatgagtttaggttttttgtggtaaagagagcgaagcggttgtgtttagtttacgtttcggcgttgtttttgtttagttaattagttttattatagatgattgttttcggttcggattgattgaatgttgatttttcgagaaattgcgaaataggttgaatttttaggaggaatgttttggttttcgttgtatttttttagaaagggtaagtagagaaacgcgtattagttgaattattggggatattttaatttatgtagatacgttttttaaagtttatataagtttttatatttatataattataggacgtagttaagggaaattttttcgggattcgtatttaatatagttaatataaaaatttcgatttttttaattttgtattatttttttgttttttaatatttttgaaaaggttaggagaaatttttttgtagtggtttttttttagtatgtttgatagtttttgagttatatttgtttattttttatttgatgataaatggaatgaaagaaaaaggaagttttaaaaaatatatagagataggtattttaaggtataaatgttattttaaagtgtgtaatattttaaaattttagacgttagattaatgttcgtgtttttttagggtattttaaatttttatattttaatttaaattagtaaaataaatatagtatgttttagtatattatattagttgtaatttttttttatatttattgttaatatttaatatttttttttgtttattatttattttaaattgaggaaaagtacgtgtaatttgtataatttaaaattgtaaagtaatgttaatttatattagagttttttttattttttatgaatatagaggaaataggtttgttgtattttttagtttatattttatgatttttatatattatttattagtttattgtataagtttagaagaagaaaattattttgttttttattgtatagtttgaggatgtttttattttttttaaataatttatattttaaagttataatttttttttatttttgattataaattttttttattttgatatattttgtttttggt

SEQ ID NO: 78 - DNA, 7432 bp, Artificial Sequence
  chemically treated genomic DNA (Homo sapiens)
atttgaagttagagttatttagaggagaaagagttggaattgagaatttaaggaatgtttggaagtgatcgggttcgagtttatttaggaagaaatagaggttggagatatgagattgtgttgttatttttttttattaatttttgggttttattgaggttttattataagtttggttttgtagtttagtgattaggagaaattagatataagataataataatagtaatgattttttttttttttttgagacggagttttgttttttcgtttaggttggattgtagtggcgcgatttcggtttaatgtaagttttattttttaggtttacgttatttttttgttttagtttttcgagtagttaggattataggcgtttgttattacgtttggttaattttttatatttttagtagagatggggttttatcgtgttagttaagatggttttaattttttgatttcgtgattcgtttgtttcggttttttaaagtgttggggttataggtatgagttatcgcgtttggttaatagtaatgatttttgagtatttatattgttagtttttacggtaagagttttttttattttttgttttgttttgttttaagatagagttttgttttgttatttaggttggagtgtagtggtgtgatcgcggtttattgtagtttttatttttcgggtttaagttatttttttgttttagttttttaagtagttgggattataggtacgtattattatttttggttaatttttgtatttttagtagggatagggttttttattatgttggttaggttggttttaaatttttggttttatatgatttgtttatttcggttttttaaagtgttgggattataggcgtgagttattgcgtttttttttgtatttgtttaagtaatatattgaaatatgtattgtgttttttattttatggaggaggaaattgaggttagtaaatgaggttgttatgggaggtggagataggatttgaatttgttttagtgtaggaggtttaagagtttttgtttttttttagggtattgtgtgggagggtgagaaggagggaggtttatagaggtatgatttttgattgttattgttatttgggttttgttttttgaagtttttgttaagcggggaggtggtcgggggagggttttgttttgtgtagttttttttttttcggttcgtagagttgagtatagagggatagaggtacggaatttttagaaatgtttttttttagaaataggttttaggttttgtttgttttgtgtttttgcgtgttggttttggtttgtattgggggtgagaagaagtgggtggagggatgtggggtttatatttggtgggtgtgagtgtggttgtgtgttttgtggttttgtagttacgtgagatatgagtacggagtgtgtgcgttttatggcgtgcgtatgtatgtgcgtgtcggggagtgtgtgtgtcggtggttgagagtgaagtgtgaatgttatattggtataaattgggattatttgtgtgtgtgtacgtgcgtgcgtggaagtgggagtatgtagtcgtggtaaaaaagtgtatgtttgtgtgtatatgtgtatttgtgtgtatttgtttttttgtggggtatgtgtgtgtaaaatatttgagtgtgtggatatgtgtgagggggtgagtgtgtgttggtgtgtacgtttgtgttttgtatatgtatttttttttttttttttgagacggagttttattttgttatttaggttggagtgtagtggtagtagtggtgcgattttggtttattgtattattcgtttattcgttttaagggatttttttgttttagtttttagagtatttgggattatagatatacgttattatgtttggttattttttttttttgagacggagtttcgttttgttatttaggttggagtgtagtggcgtgattttggtttattgtaacgttcgtttttcgggtttacgttatttttttgttttagtttttcgagtagttgggattataggagtttattattacgtttggttaattttttgtatttttattagagacggggtttcgtcgtgttagttaggatggtttttatattttgatttcgtgattcgtttgtttcggttttttaaagtgttaggattataggcgtgagttattgcgtttggttaatgtttggttaatttttttatatttttggtagagatagggttttgttatgttgtttaggttggttttgaaattttgattttaggtgattcgttcgttttggttttttaaagtgttgggattataggtatgagttattacgttcggttatgtattttatgttaaaatgggattatattttagattagtattatttagtagaaatttaaatttttaatatagggttaggtacggtggtttatgtttgtaattttagtattttcggaggtcgaggcgggtggatcgtaaggttaggagatttgagattattttggttaatagatgggtaaaaatttatttttattaaaaatataaaaaattagttatgtatggtggtatgcgtttgtagttttagttattcgggaggttgaggtcggagaattatttgaattcgggaggtagaggttgtagtgagtcgagatcgcgttattgtattttaatttgggtgatagagcgagatttcgtttgaaaaaaaaaaaaaatttaatacgtatgtagataatgtgtaaggtattattttatgtgtatcgtatgtagtaatttttaatttttacgataattttgaggtagatattattatttcgttttataaaaggagaaatagttttggggagataggataagttatcggttaaggtatatagttagttatatgtggttttcgcgtgacggttggtttttgtaggcgaggttttgtttagatgcgtgggtagaaggtttggttcggaaagaggaattgatagtaaggttaagttaatgtttgtttttgggggtagaaagttattttttgttttttttttattgtttatagaggtagtttagatagggtgggggttataggagaacgaagggagaagggggtagtttttgggtagtaaaattaggtggtgaagggaggtattagaggatggtaattagagaggttattagaggggaattataggtagatagggtgataggagggattattgatataaggtgaagagatggtttagtcggacggggtggtttatatttgtaattttagtattttgggagttcgaggtgggtggattatttgaggttaggagttcgaggttttaatatggtaaaattttattttttttaaaaatataaaaattagtcgggtatgatggtagatgtttgtaatttttgttattcgggaggttgaggtaggaaaattgtttgaatttaggaggtggaggttgtaatgagacgagattatgatattgtattttattttgggtaatagagtaagagattgattttgttttataaaaaaaaagaaaaaagaaaaaaaaaaagagatggttgatggttaaagaggggttagcggttaggggatatataagggtaaaggtaggaggtaagaggattggtagggggttgtttttgggttatcgggagcgatataggatgagtatggagggaaagggagaaggggattttagggttttagtttatttaagttgttttttggttttatttagtatgttagttagaggtttaggaaggaattttgagttttttattaaagttaaagatgagtcgttggagtttggtgaggggtaggatgaaggagttgttggagatagtggtgaataggattagagacgggtggtaatggttttggtgagggtgtgttgggttgggtggtgggaggggatttttgggtttgagggaggaggggttggggtttggatttttgagttttagggaggaggaaagggtgggagtggggttgtgatttttaggtttgggaggagtggagggttagagttgagagtaggaatttttaggttatagagaggagcggataaatggggtagagaatatttggggagagttggggtttttattgtgatgtttttttttttgtaggagttcgagtatttttcggggttttatgtagatttattatgacgattatttgagggatttgggttcgtttattaaggtttggtttttcgaatttaaagatagttttttgaagaagatttatagtttgtgttttaggtttgtttgtggggataaggattagggttaaaatgtttataaaagttaggtgtggttgtggcgggtgtttgtagttttagttatttaggaggttgaggtaggatgatggtttgagtttaggagttcgagattagtttgggtaatatagcgagattttttgggggtaaaataaaaagaaaaaaaaaagtttatatttttttaataaataaagttttatttgtgtttttgtttggatttttttttagtgtggttagaaaaaaatttattttattgttttttaggaattaatgagtagaagaggtgatatttgatggggaaggaagagtagggaggtcgggaagggtattaaggaataatattttattgtgggtttgcggagaatgggggattttaaggcgtgttagttttaggagggtgagggtaggagcgtgggtggagttagtaggtttttatgatggtttttattgagagtttcgtttttgttttttataagttttgattttatttttagtgggtatttagtatttttaatttttttatagtttttaatttagtttttgtcggaggcgaatttttagagtgagggttttttgttatttgagagaaggttttttgtgacgtgattttgggggacgttattgttttttttgtttttatttatttttttcgtagttttgttggttaggattttggtttagataaaggatgggggttgtggttgtggagcggaagtgggttttaattattataaattttttttgtgttcgttcggagttggtgaggatagtttgttagagtttggtaagaaagggatttagggtgcggggataggggggcgttagtagggagagggtaaagatcgataaagtaggaattttaagaggtataatattagaagttcgtgttggaattatgattgtgtgtgtgtgtgtgtgtgtgtgtgtgtgtgtgtgtgtgtgtgagagagagagagagggagatggagtttcgttatgtagtttaggttagatttaaatttttgggtttaagtaatttttttgttttagtttttttagtagttgggattataggtgtattattatattttataaattatagaatttagaattgtagattatttgagtttttgtttagagttagggtggttgaggtggggaggattttttgagtttaggagtttgaggatgtagtgagttgtgattttgttatcgtgttttagtttgggtgatagagaaattttatttttaaaaaagagaaagaaaaagggataggtataatggtttatgtttgtaattttagtattttgggaggtcgaggcgggtggattatttgaggttaggagttcgatattagttttattagtatggtgaaatcgtatttatattaaaaatataaaaattggtcgggtgtggtagtatatgtttgtaattttagttattttagaggttgagataggagaattgtttgaatttaggaagcggaggttgtagtgagtttagatcgtgttattgtattttagtttgggtgatagagtaagatttagttttggcggaaaaaaagaatgaaaaaatttaaaaaattaaaaaagaattgtaggttgggcgtggtggtttatatttgtaatttaaacgttttgggaggttaaggtaaacggattatttgatgttaggagttggagattagtttggttaatatggtgaaatttcgtttttattaaaaatataaaaattagataggtatggtggtgtatgtttgtatttttagttatttaggaggttgaggtaggagaatcgttcgaattcggaagatagaggttgcggtgagttaaaattgcgttatcgtattttagtttgggcgagagaataagattttgttttggaaaaaaaaaaagaattgtagattatttgtttgtgtttttttttcggggattagattttattttttttttgtcgtatttttttattttttacgtgtggatgatgatattgtgttttgtgtatgtttttcgttattaaaagtgttttttttatagagtaggtgagaatttagtgaggagatgtagggatatgaggtttgatttagggtagagttttaaggtaatatatttgatttattgtaggtttttaatggtgtttgtagagtatttttttgtattgatttagttttagtaaagggtagaggttttgttgtgttttttgttgggtttagaattgtttaggtgtttaagaaagttttttaggttgggtttagtggtttatatttgtatttttagtattttggggaggtcgagatgggaggatcgtttgagtttaggagttttagattagtttgggtaataaaataagttttttatttttataaaagaataaaaattagtagttgggtatggtggtttatgtttgtaattttagtattttgggaggttaaggtaggtaaattatttgaggttaggagtttaagattagtttggttaatatggtgaaattttatttttattaaaaatataaaaattaggtggggtatagtggtttaagtttgtaattttagtattttgggaggttaaggtgggcggattacgaggttagaagttcgagattagtttggttagtatggtgaaattttatttttattaaaaatataaaatattagtcgggtatggtggtaggtgtttgtgattttagttttttgggaggttgaggtagaagaattgttagaattttggaggtagaggttgtagtgagtcgagaatacgttattgtattttagtttgggtgatagagcgagattttattttaaaaaatacgaaaataaaaattagtcgggtggtggcgggtgtttgtaattttagttattggggaggttgaggtaggagaattgtttgaatttgggaggtgggggttgtagtgagttaagattgtattattgtattttagtttgggtaatagagtgagattttattttaaaaaagaaaaaaataataattaaaatgttaaaattaggagtagaattatagaatgttggaaagtgaggtttaagaagggggttgtgtttaagtttatgtatgggaaatttgattgggatatcgagtttatatagagtaggattttagttttttttattagagtggggcgtgattataggaatagtcgtttttagttagtttgttatatgatatttttttaatgttttagg

SEQ ID NO: 79 - DNA, 7432 bp, Artificial Sequence
  chemically treated genomic DNA (Homo sapiens)
tttggaatattgagggggtgttatgtggtaggttgattggaggcggttgtttttgtggttacgttttattttggtgggggggattgagattttgttttgtgtgagttcggtgttttagttaagttttttatgtatggatttggatatagttttttttttgggttttattttttaatattttgtgattttatttttgattttaatattttaattattattttttttttttttgagatggaattttattttgttgtttaggttggagtgtagtggtgtaattttggtttattgtaatttttattttttaggtttaagtaatttttttgttttagtttttttagtagttgggattataggtattcgttattattcggttgatttttgttttcgtattttttgagatggagtttcgttttgttatttaggttggagtgtagtggcgtgttttcggtttattgtaatttttgtttttagggttttagtaatttttttgttttagttttttaaggagttggaattataagtatttgttattatgttcggttaatattttgtatttttagtagagatggggttttattatgttggttaggttggtttcgaatttttgatttcgtgattcgtttattttggttttttaaagtgttaggattataggtttgagttattgtgttttatttgatttttgtatttttagtagagatggggttttattatgttggttaggttggttttgaatttttaattttaagtgatttgtttgttttggttttttaaagtgttggaattataggtatgagttattatgtttagttgttaatttttatttttttgtagagatgggagatttgttttgttgtttaggttggtttggaatttttgggtttaagcgatttttttatttcggtttttttagggtgttgggagtataggtgtgagttattgagtttagtttagaaggtttttttgagtatttaaatagttttgggtttagtagggaatatagtaaagtttttgttttttgttaaggttgagttagtgtagggaggtgttttgtagatattattaaggatttatagtagattaaatgtgttattttagggttttgttttaagttagattttatgtttttgtatttttttattgagtttttatttgttttatgagagaggtatttttggtgacgaagaatatgtatagggtataatattattatttatacgtaggagatgaggaagtacggtagaaagagggtgagatttgattttcggagaaagaatataagtaaatggtttataattttttttttttttttaagataaggttttgttttttcgtttaggttggagtgcgatggcgtaattttggtttatcgtaatttttgtttttcgggttcgagcgatttttttgttttagttttttgagtaattggaaatataagtatgtattattatgtttgtttaatttttgtatttttagtagagacggggttttattatgttggttaggttggtttttaatttttgatattaagtgattcgtttgttttggttttttaaagcgtttggattataagtgtaagttattacgtttagtttatagtttttttttagttttttaaatttttttatttttttttttcgttaagattgagttttgttttgttatttaggttagagtatagtggtacgatttgggtttattgtaattttcgttttttgggtttaagtaatttttttgttttagtttttggaatagttgggattataggtatatgttattatattcggttaatttttgtatttttagtatagatgcggttttattatgttggtaaggttggtgtcgaatttttgattttaagtgatttattcgtttcggttttttagagtgttgggattataggtatgagttattgtatttattttttttttttttttttttttagaaatggggtttttttgttatttaggttggaatacggtggtaagattatagtttattgtatttttaaatttttgggtttaagggattttttttattttagttattttaattttaagtagaagtttaaatagtttatagttttaaattttgtgatttgtggagtgtggtggtgtatttgtagttttagttattggggaggttgaggtaggaggattgtttgagtttaggagtttgagtttagtttgggttatatagcgagattttattttttttttttttttttttatatatatatatatatatatatatatatatatatatatatatagttatggttttaatacgggtttttaatattgtgttttttaaaatttttgttttatcgatttttgttttttttttgttgacgtttttttgttttcgtattttgagttttttttttattagattttggtaggttgtttttattagtttcggacgggtatagagaggatttatagtggttgagatttattttcgttttatagttataatttttattttttgtttaggttaaagttttggttaatagaattgcggagggggtgggtggggatagaaagggtaatgacgttttttaaggttacgttatagggaatttttttttaagtgatagggaatttttattttgagaattcgttttcgatagaggttgggttgggggttgtggaggggttggaggtgttgggtgtttattgggaatggagttagagtttgtaggagataagggcgaagtttttagtgagggttattatggggatttgttgattttatttacgtttttgtttttatttttttgaaattgatacgttttgaagttttttatttttcgtaagtttataatagggtgttattttttgatatttttttcgatttttttatttttttttttttattaggtgttattttttttatttattgatttttgggaggtagtggggtgggtttttttttggttatattggggaaggatttagatagggatataggtgagattttatttattggagaagtatgaatttttttttttttttttgttttatttttaagagatttcgttgtgttgtttaggttggtttcgaatttttgggtttaagttattattttattttagttttttgagtagttgggattataggtattcgttataattatatttggtttttatgaatattttaattttggtttttgtttttatagataagtttggggtataggttgtgggttttttttaagaggttgtttttggattcgaggaattaggttttggtgagcggatttaggttttttaggtggtcgttatagtaggtttgtatgaagtttcggaaggtgttcgggtttttataggagagaggatattatagtggaggttttagttttttttaggtgttttttgttttatttattcgtttttttttgtgatttaggagtttttgtttttagttttaattttttattttttttagatttaggggttatagttttatttttattttttttttttttttgagatttaggggtttaggttttagtttttttttttttagatttaggagtttttttttattatttagtttagtatatttttattagaattattgttattcgtttttggttttgtttattattgtttttagtagtttttttattttgttttttattaggttttagcgatttatttttagttttggtggggggtttagggtttttttttgggtttttggttggtatgttaggtggaattagagggtaatttgggtaggttgggattttagaatttttttttttttttttttttatgtttattttgtgtcgttttcggtggtttaggggtagttttttgttagtttttttgttttttgtttttatttttatgtgttttttgatcgttaatttttttttaattattagttattttttttttttttttttttttttttttttttatgagatagagttagttttttgttttgttgtttagggtggagtgtagtgttatgatttcgttttattgtaatttttattttttggatttaggtaatttttttgttttagtttttcgagtagtagggattataggtatttgttattatgttcggttaatttttgtatttttagaagagatggggttttgttatgttggggtttcgaatttttgattttaagtgatttatttatttcgggtttttaaaatgttgggattatagatgtgagttatttcgttcggttgggttatttttttattttgtgttagtagttttttttgttattttgtttgtttgtggtttttttttaatggtttttttaattgttattttttgatgtttttttttattatttgattttgttgtttaggaattattttttttttttttcgtttttttgtgatttttattttgtttgagttatttttgtggatagtggagggagagtaggaggtgattttttgtttttaggggtagatattggtttagttttgttgttagttttttttttcgggttagattttttatttacgtatttggataaagtttcgtttatagagattagtcgttacgcgggggttatatgtagttagttgtgtgttttggtcggtgatttattttgtttttttaggattgtttttttttttgtagaacggggtaataatatttattttagggttatcgtgagaattaagagttattatatacgatgtatatggaatggtgttttgtatattgtttatatacgtgttaaatttttttttttttttagacggagtttcgttttgttatttaggttggaatgtagtggcgcgatttcggtttattgtaatttttgtttttcgggtttaagtgatttttcggttttagtttttcgagtagttgggattataggcgtatgttattatgtatggttaattttttgtatttttagtagagatgggtttttatttatttgttagttaggatgattttaaattttttgattttgcgatttattcgtttcggttttcgaaagtgttgggattataggtatgagttatcgtgtttggttttgtattaaaaatttaaatttttattggataatgttgatttagaatatgattttattttaatataaagtatatggtcgggcgtggtggtttatgtttgtaattttagtattttgggaggttaaggcgggcggattatttgaggttaggattttaagattagtttgggtaatatggtaaaattttgtttttattaaaaatataaaaaaattagttaggtattggttaggcgtagtggtttacgtttataattttagtattttggaaggtcgaggtaggcggattacgaggttaggatatggagattattttggttaatacggcgaaatttcgtttttagtaaaaatataaaaaattagttaggcgtggtggtgggtttttgtagttttagttattcgggaggttgaggtaggagaatggcgtgaattcgggaggcggacgttgtagtgagttaagattacgttattgtattttagtttgggtaatagagcgagatttcgttttaaaaaaaaaaaatagttaggtatggtggcgtgtgtttgtagttttaaatattttgaagattgaggtaggagaattttttgaaacgggtaggcggatgatgtagtgagttaagatcgtattattgttattattgtattttagtttgggtgatagagtgagatttcgttttaaaaaaaaaaaaaaaaatgtatatgtaaaatatagacgtatatattagtatatatttatttttttatatatgtttatatatttaaatattttgtatatatatattttatagagagataggtgtatataaatatatatatgtatatagatatgtatttttttattacgattgtatatttttatttttacgtacgtacgtgtatatatatagatgattttagtttgtattaatgtgatatttatattttatttttagttatcgatatatatatttttcgatacgtatatgtatacgtacgttatgaaacgtatatatttcgtatttatgttttacgtggttatagagttataggatatatagttatatttatatttattaggtgtgggttttatatttttttatttatttttttttatttttaatgtaggttaggattagtacgtagaggtatagggtaggtagggtttggagtttgtttttgaggagggatatttttgggggtttcgtgtttttgtttttttgtgtttaattttgcgggtcgggggaggggaggttgtatagagtagggttttttttcggttattttttcgtttggtagagattttagagagtagggtttaggtgatagtggtaattagaggttatgtttttgtgggttttttttttttttatttttttatatagtgttttgagagaagatagaggtttttgagttttttgtattgaggtaggtttaaattttgtttttattttttatgatagttttatttgttggttttagtttttttttttataaagtgggaggtatagtatatattttagtatattatttgaataaatataaagaaaggcgtagtggtttacgtttgtaattttagtattttgggaggtcgaggtgggtagattatatgaggttaggagtttgagattaatttggttaatatggtgaaaaattttgtttttattaaaaatataaaaattagttagaagtagtgatgcgtgtttgtaattttagttatttgggaggttgaggtaggagaatggtttgaattcgggaagtgaaggttgtagtgagtcgcgattatattattgtattttagtttgggtgatagagtaagattttgttttgaaataaaataaaataaaaaatgaagaaagtttttatcgtggagattggtaatataggtgtttaaagattattgttgttggttaggcgcggtggtttatgtttgtaattttaatattttgggaggtcgaggtaggcggattacgaggttaggagattgagattattttggttaatacggtgaaattttatttttattaaaaatatgaaaaattagttaggcgtggtggtaggcgtttgtagttttagttattcgggaggttgaggtaggagaatggcgtgaatttgggaggtggagtttgtattgagtcgagatcgcgttattgtagtttagtttgggcgaaagagtaagatttcgttttagaaaaaaaaaaaagattattgttgttattattattttgtgtttaattttttttagttattgggttgtagggttaggtttgtggtagggttttaatagggtttaagggttgatgagaggaaatagtaatatagttttatgtttttagtttttgtttttttttaggtgggttcgagttcgattatttttaagtattttttgagtttttaattttaatttttttttttttgggtgattttggttttagat

SEQ ID NO: 80 - DNA, 12423 bp, Artificial Sequence
  chemically treated genomic DNA (Homo sapiens)
tttatttgagttttttttgttgtagagaaagtttttttgtgattttatttttttttttaaatgttgggaaatgtttttgagttttgtttttgatatatatattttttttgggttgagggatggggattgggatatatgttttgggaagggtaggtgtagagtgatggggttgacggggtgggggaagtagggggaggagttgtttttttgaggtttttgggaatcggttgtgttaggtatttttagttttttagttaagtaatatagagagttaaaagaggttattagagataagaaggtttttatggggttattgtttgtgggggatgttagtagtggggaggagtgaagtaggaaggaatcgggagattggatggaattgttttttttatacggttatatatagttatatatggttattgggattagagttagttttgtttgggtagttaggtttttagtgtaagttattagtttatttggaggggattagtgtttcggttaataaggttagttggtttttttttagttggagtttatttaattttgttaggaagttagagagttggataagtggagtttagtttggggaggtggaagagagggaggatggagtatggtgaagtataggtggtttttttggtagttttagttttggttttggaatagtttgggtagtgtgttaattttttttgttattgtcgttttattgatttttatgaatgagttgcgaggtagttatttttagttttttatggataaatattcgaggtttagagagggtaagagatttgtttgcgattttttagtatttttgtttttttttggggttttgagggtataataaagatttttaaggtttttttttttcgtaggaggtttaggcgtagttgtgggggagggtgtttttggtgttttttgtttttgtagttagtttgttttttattcggtagttttttttttttttttgggatgagatgtgtacgcgatgatgggattttgtaaatgggttgggaagaaggagttatttttttaaagggttagtttttttaggagtgttcgaatttttaaagggggtagggttttatataaattttatttagaagtaggattataagagtttttgtagtatttttttttttttgttggttttttttgagtgtgtattttgttttattagcggaatatttgcgggttagggttattggagatagggttatatcgtttgggcggttatttaagtaattttattattttgagtattttttttttttatttgaaaggtggggggttatttatttagtttttagggttgttaaggtgattaaatgggataatggttgtattatttttgagtaaagggtattatagatgggaagattattttagtttcgtagggagttagatgggttgtgagggaggggtaaaggtagggttggagggggttggaggggttggttgagtagggtatatatggggggggtttttttttaaatttagaaaaatttttagttaggtttagtgtttttgttgagaaattgaggtttaaagaaaggaattttttgtttttttgtttttttttttttgtttgaggttatttatttatttaataattttgtgttcgatattagataaggttttagtgagtaaaatgaatatagtttttttgggaatatagagtttagatagggagatgattattttattattgtaaatataaatatataattttagtttgggttaagtgttgtgaagttttagatttgtgtttggttcggtgttgtattttaagtattttggtatttaagtggtattgaaatatttgttggaaagaaggttattttgaggaggtgatgttagagttgaggtttggagggttggagttaaataaagatggttttaggttttttttgttttttttgtaggttttgtttttgttttttttttggtatttaggttaagggtaagtattttcgattggttattagttttaatatgtcgagtatagggattagattttgttttgcgtggtcggttttttttaggttttgaatttagggaagtgtatgtggattttaatttatttagatggtgcgtttgtgtttgtttttttttcgggtatgttttagaatagagtttagtttagagtttaggggtggtcgggatgatggatgagggtgtggggtttgttgattattaggggatttgattattgggttgggttagtttttttgtttttatttttttttttgtaaagaaggggtgttgggcgtttttatttttcgcgttagtttcggggtttttattttggcgggaagggtaggtcgattcggtagattgcggtttttcgggagggaagaaggtgttagacgcgcggagtaattataaatagttttttttttttagaagacggtacggggtttaagatttaggcgtcgtatatttagaatgagagtagagattttcgttaggaaaaaaaggtatttaggggatttgtttattagtatgaaatgtaaatgagttcgttcggttttatttatataattttgtgtatggattcggcgaaagggtaattagggagacgacggcgtagtagttattttgttattttttttattttttttttttatcggtcggggcgggaattgagacgattttaattttttgcggtggcgggaggtgcgcgggggttgcgtgggtggtgtagttttaggagagtgaataacgtttaggggtgatggttttagtaaagtgaggggtggtgatggaggttattcgatttatttcgtcgttttttcgtagtggcgtaagcgttttaaaattttcggagagggaattgattgatttattaggtttcgtcgtgtttatttttcgtagatgttggggaagtgtttttcggcgtttaattttcgttgtttttttttttatcggcgtttagtatattcgcggcgtttcgttttcgggtatttatagttttttggagtggcgtcggcggtaggagagagttagagtcgattgagttttagaattcggggaggtaggcggggtaagggtcggggtttgcgcgtgcgtgtgtacgcgtggaaagtataaatttacgagggttcgttgtcggtagggttaaggtgagtgagtgaaggcggtagattcgcgaagttttagtttcgcggatattttttttttaagttatatagggatttaagagaaattgaggtacgaagttggggggtggcggtggtggggattttgaaggtcgagtcgataaagtttagttttgtgttttcgtttttttttatatattcgagatttttataggtttttttttaggggttttcgttttgtttcgtagttttttttggggattcgggttttgcggtttagcgcgatttgtttggggttacgtgtttaagtacgaagtttttgcgtggagtttacgttttttaaaaggtttttaggggtaaagggatgaagtttaggagcgttaatgtgaggttaggtttagcgggttagggttacgaggttagggtcgaagttttagaattgattcgggagtatgattaataagtttaagagatttgtggaggttacgtttagattatgtttattttagtttttttcgagtttcgttcgtttttttaagattgggtttttttagtttgaagttttatttttaggatatttagtttcgtttttttttttttttagtttcgtagttaagtttaattttagggtgggagattaattaggtggagatttgggatttcgttttgggattttttggtgataatttttattttcgtgtcgtttgtttttttttttttttaggttcgtttagagttgagtttcgtttttcggttgttgtttaaattaggggtcgtggataaaggatgtttggggtttgcggttttacgttaggatttcgcgtcgaatattttgatttttcgggttttttttaagggagttttaaagattttaatggttaataggaaagtgggttcggtttgggtagtagtttgattggttttagttttcgggagcggatttaggggtaaggggaggggagaggggcggttttgggttttggggtgggaatcggattttagttgtggttttttttttgcgttttcgttcgtattgttacggcggacggttaatgggcgcgcggttcggggtcggcggcgttcggcgattggttgcggggttgtttgggggcggggtcgaggtttgaagttgaagtgagggatttagttgtggtgtgcgcggggtttttcgtcgtcgttttcgttcgttcgtttcgcgtttcggtcggaggaggaggttgtggcgtcggcgatagttacggtagcggtagttatcgcggcggttgcggcggcggtattttcgtttttattttcgttcgggattgttttttattgttttttcgtttttttcggatagtgagttcgcggcggggcgggggaaggagtcgtttttattttttttaagtttatttttaaagagatttttttttttttttttcgtcgtttggcgcggagtcgggacgatgttgattttttagattcggttttagttgcgtcgcgggaagagggggcgttttttttcggattttcgtttttcgtcgttgttttttttttcgttcgttttttcggggcggtttcgtcgaaggtagcgtcgaattcggtaatcggagtttgggcgcgaagcgaagaagtcggaataaagtgagggggagtcggtcggttggttcgggaagttttaggggcgtaggggaagcgggattcgcgtcgggcggggtttttttgcgtttcggcgtttcgcgggtagtatgtttttgcgggtagggggagttgggttgaattggttttttcgggggtttagtttgcgttttagagtttattagatgtgttttcgtcggggttttcgggttgcgtgaggatattttttttgaggggcgtcgtttgttttttttcggatcgttcggggtttcggttggttagaggatggacgaggaggaggatggagcgggcgtcgaggagtcgggatagtttcggagttttatgcggtttaacgatttgtcgggggtcgggggcggtcggggtcggggttagtagaaaaggattcgggtagcgcggatttcgaggcggaggggttgtcgtattcggcgttggtttcggtggtttttttttatttgagttaggatagtcgttcgcggagttggtgttttcgtacggtttgtaatttatatttttcggggtacgacggttaggcgcggggttagaagggggacgggtcgtatcgtcgggggtcgggggggaagaagatttatcgttaggtgagtcgaagtgagttcggagggtaggcggatggggggggggttgttagggaggggagggggtattagagtgggagcggagacgcgagtaggtttcgtcggtaattcgggtttattttatttgcgtatatatattttagtttttttgggttgggggggtggggatttaggttaggagaagagagttgtgtttcgttggttcgtagttggacgttttttagatgtggttaggggagggtcgttattttttagatgtgggaagtttcgggagtttgggagttgtattttgttcgcgtcggttagcgagttgggtttggttttcgagtttggtggggggtgggtgggggcggtggggaggaagttgcggggacggaggaggggggatcgtaattttttgggtttttttttttttttcgttttaaagtttgcggcggattttagggtttgattttttaatttggtttttgaggttgaggtttttattgatttagaaggagatgttggggggcggggattaggttttggtttattttattttttatttcgcgggttggaggtataataaggagatttcggcggcggttgatgttaggggcgtagaatgagaataagatgtggtggaggggagttgtttgttttcggagttgggagtggagttttttttcgttagagtttagtgtcgcgggtgttttttattcgatttttattcgatgtagggtgtttaagattgggttggggagttttatgttggattttttttgtggagggaaagattgtgttaagagtttttttagtaagtgggggatggggttaagttggtttaggttatttttttttttttataaataaagagtgtttttgtagattaggtatgggggattgtaggttcgcgaaagttttgaggggatagtaatattgttagtgtgtttattaaggaggattcgggtttattattttagcgtagatttcgtagataggtttggggaatgtaagttttatattttagggagatggatttagtattgttttttgtttgtttaggttggagtggtaggggagattttagtttagttagattttagtttaaagcgttatttgatagacgtttggttttaagttttttggcgggttttgttatcgggggaaggaaaggtggaggggaggtgttgttgttattttaggtttggatagtttttttgggttttttttttttagtttagaggtttttatagatttagggtgggagattttaggttttttttgtagtttttgtgagtttagtagggattttgttttggggaaggggggtggaaggttggtgtcgtttttattttttgtagttttgttgtttttagtgcgtaaagtagggatgagtttgtggtttttttatttttattttttatattttgtgggtttttaggaagttttttttattatattttttttttatttattgttttttttttttttttttttgagttgtagaaagagaggtgtaggttttagaggtttgtgtttttgttgaataggtataattttgaggtttgagtttttagttttaggttttttttttttaggtagggatggagatggagaattgatatggttggaaaggatgggtttcgagtaatttttttttttgtttttaattatttattttttttacgaatgggaaaaagtattaatttttatgtttttttttttaagggttttaggggaggtagagagagttttttttttttttttttttgaaaatagatttttaggttagtattttttttcgtttgttttatttttaggtgttagtggagggtttggaggtagatttttttattgagtggtttggacgggggtaagtgttgaggtttggtatgggggaggagaggtgggaggatagtatttattttgggagttggggagtagttttttttaggggagtggtagttgggtgtgtggtattagtattattaggtttggagaagtttgggttggttgaggatgggttgagaataattttttggtaggggattgtttaagttgtgttttttattattgttattttatttaagtattaagagatatttgtatttttgttgttagaggggttttgaattgtttttagggtttttttttttttttttgtggtatttgtgattttttataggttttaggagggtttttgtacgtttttgagtcggagggatataaggatatttttttttatttttaattaattgaagttagttaggttttttttggtatattttgttttttggttttttttttttaagggattaggttttttagagaggagatttagatttaggtaggaagtgtgtgtgtgtgtgtgtgtgtgtgtgtgtgtgtgtgtgtgtgtgtgtgttgtaagggaggatagtaaaaggtttagaagtgtaagttttggtgtggagagtaggggtattggtagatagttatttttgttttagattagaggggagtatgttggtttttttagtatgtgtttttgtaagtgtgagggagcgcgtttttttttcggggaggagttttttcgtattttttttttggttgttgtgttatatttggaagtttgtgtaggagtttttttaagtttagagtttagtatagtttttttttatttggaaattataggttggtatttgggatgtcgagagagggggagtgggaggggggttagagggggaagaggggagtttgttaggagtcgggggaggagaggggggggaggtttgaacggtaggagttttaatggtttttagaagtgagtgtgagtgagtgattgtgcgttattttgtgtgtttgagtgtgtttttttagaggggtgggggtataggagtttttggagttttttttgttatattgttttaatgttttaagtttgtttattttttttatttagggagaattttttatttttgtttttagaggaaatggtggggggagtgttttttttgtttttttattaatttttttttttaatttaatttttaaattttaagtttattagaggagattttggggagaagggttggggttggagaattgaatgggattgagggggggttagattattttttggtatgttttttgttttaggtttattttttttttgggttatatatatatttttttttattcgttttgttttatcgttttgttgggggattttttattattcgtagtgttagttggagttatttttgggattatttttattatatagttttttttattttcgtttgttttcgtttagtatttatttcgttttgtttgttttagttaggatggcgatagatataattgtttatacgtagatatgcgtacgcgcgcgtatatatatacgtatatatatatatagagttatagacgtttgaattagatttttggtttatttttttttttaaagattttagcgggtcgttttttttgtgtttttgtgttttatgtttttgtttttgggtggagtcggttgtttttttgtgagttttagtttttaatttagttggaagtttttttttttttatatttatgtattgaagcgtggtgaggggggaattatagggaaataggtttgtggggtgaggggggggggttttgttgggggaatttttttttgagttttggagtagggcggagtttttatattttatgttattttaggggttgtcgaattcgatagatattaggagtttttttgtgggatgggtgaggtaaggatttatttttttatttttttatttattagaaggttaggatttttgggtttaggtttattttttttttaacgttttttagttttatatttttaggtttttaggtgggaatggggtcgttggagggtttgtttgtttttttagtttatgtttagagtttttgtgtttttagaggtgttttagttattttttttttttttttattttttttatttttgcggttgttaggttaagtaagggttttatttagataaagttttatatagaggatttatttgtggagataatatgttttagtttttttttttaggagggaggaaaggaggagggatggaagtggggtttttttttttgtcgttttttttttttttgtttttgatggtgggttgtggggagaagaaagattttttttttttttattttttttttgggatttattttagttcggatagttattatagtaatagtagatatgtgattgtataggttttttatagttattatggtaattagtgtttttcgtttttttggttattatggggatttgttatatggtttttttttaatttgataatttgtgggtttttttgattttttttttttgtataaggataagataatagttttagttaggggagattatgtgagaggggtttttttaattattatgataataaatttatattatttggtgatatatttttttgtcgttatggtaatagaagaatattatatagtgatatattgttatgtttttaaggaaataagttttattttgagaagggtgaaagatttttttttttattaattatttttttatttagagtgttttaaattgtcgtgtgttttggttttttttttgttcgtttatgtttacgtgtcgtggaaggagagttgtatagggtgggtaggatgttatttggaagtaggttgaattgttaagggatttttaagaaggggttgatatgattaagagttgtgtatgaggttattcgggggtaggttttgtttgtaagaggtttttagtttgagtttgggtaaggtggggatagaaagaggggtaatttttttgtgaggttatttttgtatttttttttagttataagtagtttatttttgttaagggaaataaggtaggaagatttgaatggggatatatatttggtttttaggtagggagatttattgattggttgattcgtttatttatttatttagtttttttaggtattgattatttgtttcgtgttaggtattatagtaagtttcgtaggggatttaaagacgtattagaatgtttttgtttgttaggagttttagtttagtaggggaggtcgataagtgtatagattattaatacggtggaattttgttattagaggggtttaagtagatgttttgggagttttttttttttagagatttattgtttttatatagagatatttatttattggggttttttttagatttttttttttttgtagaggagaggaggggatttgtatggggaaagtagattagtttttgagggtaattgtgtttttttttttttaaatgatggttttttttttgtttttttttttttagggtgatttttggttgaattttattttggggagagatttattgtatttcggttttatttagaaaaataattttatggaaatagagtattttttattttttttttgttatttgtttatttttaaaaatttagaattttttttttaaatttttttatttttgtgagggggtgggggttagggaaattgtagtgtattaggattttcggggtattacggataggtggcgagtaggtatgtgagtttaggggagaagggtttgggtggtggagaagagataggggagggttgttaggggtttgagggatttatgggttatgggggagggtatgtggtttgggagttagaatagagatgggttatggttgggattagttgggaggaaggtttataggtttttgaatatttttgttggtttttttatgtttggttaaagtttttttattttagaagtaagattttatttgttttgggttttatagagtttggtttggtgggttatgttaggagttgttataatattttttttatttttattttttagggggtttttggttttttttttttaattttttgttttttgattttttttagtttttttatttttttttattttttttatattttttttaaagaaaataggatatttggttatttaatcgtgagtttagtgtttggaattttttaaggttcggaggtcgttttgtatatttttttgttgatgggttggaaatgagttattttatagaatttattgtatggaaagatttagggtttagaaagaattttttttttttgtttgttgttttggttggtttgggttggaagttataagtaggtgtgatggcggtaatggttttttgggggagggggtagatattgtttattttgtacggtttgggagttatgtttagtatggtgtttgatatataatgggtttttaatatttaaatgtgtgaatatgtttagtggttatttgagggtgttgagaggttgggaggttggtggtggaagagggagtttcgggttttggtgttgtagtaggggggattgtagttgtggacgtttgttttatatttagtgttagggcggttatgataggtagttttgtttgtttgagtagttatggtgtgtagaggaaattattatatattaggagtttggaaattatcgttttattttgttttttcgggtgatttttagtatatgatttcggtatttttgggttttaattttttcgagttttggggaagaaaatgatttattttagatattttatagggttgttgtgagtattaattgtggtattgtgtgaaagtgtttggtaaattgtaaggtaggtataattcgattttaggtttgtataatatatttatatatagtattttatttgttttttatatttattttgtgaggtagggagaataggatttagattttgtagtaaatttatggtgtttggtatttttataggtatgatcgatttattttttaaatggtttgtgtaaatagttagggtatttgtggtttgtttttttttatagatgaggaagttgggtttagagaggtgagatgattaaggtgggattttttttttttgatgaggagtttggggttgggggttggtttgcgtgtatgttagggttttggtattatatttgtttagttttagatggagttaggaggtaaacgaggaggaggtgttagggcggggtcggggggtcggttttagttttagttttggttagttgtttttttgattgttagtatt

SEQ ID NO: 81 - DNA, 12423 bp, Artificial Sequence
  chemically treated genomic DNA (Homo sapiens)
ggtattggtagttaaggaaatagttggttaaggttggagttgaggtcggtttttcgatttcgttttaatatttttttttcgtttattttttggttttatttgaggttaagtaggtgtggtgttagggttttgatatatacgtagattagtttttagttttagattttttattagagaaggggagttttattttggttattttatttttttggatttagtttttttatttgtaaaggaagataagttataaatattttgattatttgtataagttatttggggaataaatcgattatgtttgtggaaatgttagatattatgagtttgttgtagaatttgaattttattttttttattttatagggtagatgtgagaagtaaatgagatattgtatgtgaatgtgttatataaatttaaagtcggattatgtttgttttatagtttattaagtatttttatataatgttatagttgatgtttataatagttttgtgaaatatttggggtagattatttttttttttagaattcgaggaagttgaggtttagaaatgtcgaagttatgtgttgaaggttattcgagaaggtaggatgagacggtggtttttaagtttttgatatatgatagttttttttgtatattatagttgtttaggtaggtagaattgtttgttatgatcgttttggtattaggtgtaaggtagacgtttatagttgtagttttttttgttatagtattagagttcggggtttttttttttattattagttttttaattttttaatatttttaaatgattattaggtatatttatatatttaaatattgaggatttattatgtgttaggtattatgttgggtatagtttttaagtcgtgtagagtggataatgtttatttttttttttaagaggttattgtcgttattatatttgtttgtggtttttagtttagattagttaaaatagtaagtaggagagaggggttttttttaaattttgggtttttttatatagtggattttatggagtgatttatttttagtttattagtaggagaatgtataaaacggttttcggattttagaaggttttaggtattggatttacggttaaatgattaagtattttattttttttaaggaaaatatgagaagggtggggaagagtaaagaggttagaaaagattagagagtaggagattggggaaaggagattagagattttttggggaatggggatgggggaggtattgtggtagtttttggtatgatttattaagttagattttgtagggtttagagtaggtggaattttgtttttggaatgagaaggttttggttaggtatgaagaggttagtaggaatgtttaggaatttatggattttttttttagttggttttagttatagtttatttttgttttgatttttaagttatatgtttttttttatagtttatgaattttttaaatttttgatagtttttttttgttttttttttattatttaggttttttttttttagatttatatgtttgttcgttatttgttcgtggtatttcgagagttttaatgtattgtagtttttttaatttttatttttttataagaataagagggtttaagaaaaaagttttaggtttttgggggtaggtagatgatagggaggaaataaaaagtgttttgtttttatggaattgtttttttgagtagagtcggagtgtagtggatttttttttagaatggggtttagttaggggttattttggaaaaagggggataggaagggagttattatttggaaagggaaagatatagttatttttaagaattggtttgttttttttatgtaggttttttttttttttttgtagggaaaggggggtttggaaggagttttagtgagtgaatgtttttgtgtggaggtagtagatttttgaggaagaggggtttttaggatatttgtttggatttttttaatggtagagttttatcgtgttagtaatttgtgtatttgtcgattttttttgttgagttggggtttttgataggtaggggtattttgatacgtttttagattttttacggagtttgttgtagtgtttggtacggagtagatgattaatatttgggaagattgaatgaatgaatgaacgaattaattaattaataagtttttttgtttagaagttagatgtgtgtttttatttaggtttttttgttttgttttttttgatagaggtgaattgtttataattgggggaaggtatagaagtgattttatagaggagttgtttttttttttgtttttattttatttaggtttagattggaggttttttataggtaaagtttgttttcgaataattttatgtatagtttttgattatgttagtttttttttaagggttttttggtaatttagtttgtttttaagtaatattttgtttattttgtatagttttttttttacgatacgtaagtataaacggatagggaagagattaaggtatacgataatttgggatattttgaatagaggaataattaatgggggggggggttttttattttttttagagtagggtttgtttttttgggaatatggtagtatgttattgtgtgatgtttttttgttgttataacgataggaggatgtgttattaggtggtgtggatttgttgttatggtaattaaaaagattttttttatatgattttttttgattgaggttgttgttttgtttttatgtaggggaggagaattagggagatttataggttattaggttgggggaaaattatgtgatagatttttatggtaattaagggaacgggggatattggttgttatagtgattatgagagatttgtgtagttatatgtttattgttgttatggtgattgttcgggttggagtggattttaaagagggggtaggagaggggaggattttttttttttttataatttattattaaaagtagagaaaaaggaaacggtagagagaggaattttatttttatttttttttttttttttttttttgggagagagaattagagtatgttatttttataaatgagttttttgtgtggggttttatttagatagagtttttgtttagtttggtagtcgtaagggtgaggaaagtagggagaggaggggggtggttgggatatttttaggggtataggggttttgggtatgggttgagaaggtaagtaggttttttagcggttttatttttatttaggagtttggaaatgtgagattaaggaacgttgaggagaaaatgggtttggatttaggagttttggttttttagtaaatgaggaggtagggggataggtttttgttttatttattttatagagaggtttttggtgtttatcggattcggtaatttttagggtaatatgggatgtaggggtttcgttttgttttaaagtttaaagggggatttttttagtagaattttttttttttattttataagtttatttttttgtggttttttttttattacgttttagtgtatgggtgtagggggagagaggtttttagttgaattgaaaattgaagtttatagaaaggtagtcggttttatttagagatagagatatgagatatagagatataagagagacggttcgttggaatttttggaaggggaaataggttagaaatttgatttaaacgtttgtgattttgtgtgtgtgtgtgcgtgtgtgtgtgcgcgcgcgtgcgtatgtttgcgtgtgagtagttgtgtttgtcgttattttggttgaggtaggtagggcggggtgagtgttgggcgggagtaggcgagggtggggggggttgtgtggtgggggtaattttaggaatggttttaattggtattacgggtgatggggagttttttagtagagcggtggagtagagcgggtgggaaggaatgtgtgtgtgatttagaaggaaagtgggtttggggtagaaagtatgttaaggggtgatttggtttttttttaattttatttaattttttagttttagtttttttttttagaattttttttggtgagtttagggtttggaaattaaattggaggagggaattgatgaagagataggaagaatattttttttattattttttttgaggatagaaatggagaattttttttaggtaagagaaataggtagatttggggtattgggatagtgtggtaaggaaggttttagaaatttttgtgtttttatttttttagagggatatatttagatatatagagtgacgtatagttatttatttatatttatttttggaagttattagggtttttgtcgtttaggtttttttttttttttttttttcgatttttggtaggttttttttttttttttttggttttttttttattttttttttttcggtattttaaatgttagtttgtgatttttaaatgagaaaaagttgtgttgggttttgagtttggagaaatttttatataaatttttagatgtgatataatagttagagagggaatgcggaggaattttttttcgagaggggagcgcgtttttttatatttgtaggaatatatattggaaaggttagtatgtttttttttgatttgaggtaggggtgattgtttgttagtatttttgttttttatattaaagtttgtatttttgagttttttgttgtttttttttgtaatatatatatatatatatatatatatatatatatatatatatatatatattttttatttgggtttagattttttttttaggaaatttggttttttaaaaaggagaggttaagaagtagaatgtattaagaaaagtttaattagttttagttagttgggggtggaggggagtgtttttatgttttttcggtttagaggcgtatagggatttttttgaagtttgtggggagttatagatattataaagagaaagagggaggttttggaggtagtttagagtttttttggtagtaaaaatataggtgttttttggtatttgggtaggatggtagtggtgaggggtatagtttaggtagttttttgttaaaaaattgtttttaatttatttttagttaatttaggtttttttagatttagtaatgttgatgttatatatttaattattatttttttgggggaagttgttttttaatttttaaggtgagtgttgtttttttatttttttttttttatgttaggttttaatatttgttttcgtttagattatttagtgaaggagtttgtttttagattttttattagtatttggagatagggtaggcgagaagagatgttagtttagaggtttgtttttagggagaggggagagaagagttttttttattttttttgggatttttgagaaggaggatatagaggttgatgtttttttttattcgtggaaggggtaaatgattaggggtagagaggagagttgttcggaatttattttttttagttatattagttttttatttttatttttgtttgggagaaaggggtttggggttgggggtttaaattttaagattgtgtttatttagtaagaatatagatttttgaggtttgtatttttttttttgtagtttagagagaaaggaagaaggggtagtggatgagaagaggatgtgatgaggggagttttttaaagatttataaggtgtagaggatgggggtgggggggttataagtttatttttgttttgcgtattagaggtagtagagttgtagagagtgagggcggtattaattttttattttttttttttaaagtagagtttttgttaggtttataggggttataagggagatttggggttttttattttgggtttataagaatttttgagttggaaggaaggagtttagagaagttgtttagatttgagatggtagtaatattttttttttatttttttttttttcggtggtaggattcgttagggagtttggggttaggcgtttgttaagtggcgttttgagttagggtttgattgggttggggttttttttattattttagtttgggtagatagggagtagtgttaaatttatttttttggaatgtggggtttgtattttttaaatttatttgcggagtttacgttggggtggtggattcgagttttttttagtgaatatattgatagtattattgtttttttaagattttcgcgggtttgtagttttttatatttggtttgtaggagtattttttatttgtgaaaggggaggagtaatttggattagtttaattttattttttatttgttaaaaaagtttttgatatagtttttttttttataagaaaaatttagtataaaattttttaatttaattttaagtattttgtatcgaatggagatcgggtaggaggtattcgcggtattgggttttagcggaaaggggttttatttttagtttcgggggtagatagtttttttttattatattttgtttttattttgcgtttttgatattagtcgtcgtcggaatttttttgttgtgtttttaattcgcgaggtggggggtgaggtgggttaggatttggttttcgttttttaatatttttttttaggttagtaaaaattttagttttaaggattaggttgggggattagattttagaattcgtcgtaaattttggggcgggggaaggagggaaatttaggagattgcggttttttttttttcgttttcgtagttttttttttatcgtttttatttattttttattaaattcggaaattaaatttagttcgttaatcggcgcgggtagagtatagtttttaggttttcgaagttttttatatttggaggatgacgatttttttttgattatatttggagggcgtttagttgcgagttagcggggtatagttttttttttttggtttggatttttatttttttaatttaggaagattgaggtgtgtgtacgtaggtggggtaagttcgggttatcgacgagatttgttcgcgttttcgtttttattttggtgtttttttttttttttggtagttttttttttattcgtttatttttcgggtttatttcgatttatttggcggtgggtttttttttttttcgattttcggcggtgcggttcgttttttttttgatttcgcgtttggtcgtcgtgtttcgaaggatatgggttatagatcgtgcggagatattagtttcgcgggcggttgttttggtttaagtagaagaaaattatcggggttagcgtcgggtacggtagttttttcgtttcggagttcgcgttgttcgggtttttttttgttgatttcggtttcggtcgttttcggttttcgataggtcgttgagtcgtatgaagtttcggggttgtttcgatttttcggcgttcgttttattttttttttcgtttattttttggttagtcggggtttcgggcgattcggagaggggtaagcggcgttttttagaggaggtgtttttacgtaattcgggggtttcggcgggggtatatttggtgggttttagggcgtaagttgagttttcgggagggttagtttagtttagttttttttgttcgtaggggtatgttgttcgcggggcgtcggggcgtagggaaatttcgttcggcgcgagtttcgttttttttgcgtttttggggtttttcgggttagtcggtcggtttttttttattttgtttcggttttttcgtttcgcgtttaggtttcggttgtcggattcggcgttattttcggcgaagtcgtttcgagagggcgaacgaaaaggggggtagcggcggagggcgggggttcggggaggggcgtttttttttttcgcggcgtagttggagtcggatttaaggggttagtatcgtttcggtttcgcgttaggcggcgggggaggggaggagggatttttttaggggtgggtttggagggggtgggggcggttttttttttcgtttcgtcgcgggtttattgttcgggaggggcggggagatagtggggggtagtttcgggcgggagtggaggcggagatgtcgtcgtcgtagtcgtcgcggtggttgtcgttgtcgtagttgtcgtcggcgttatagttttttttttcggtcgagacgcggagcgagcgagcgaaagcggcggcgaggagtttcgcgtatattatagttggattttttattttaattttaagtttcggtttcgtttttagatagtttcgtagttaatcgtcggacgtcgtcggtttcgagtcgcgcgtttattggtcgttcgtcgtggtagtgcgggcgggagcgtagggagagaattatagttggaattcgatttttattttaaaatttaggatcgttttttttttttttttttgtttttgggttcgttttcgaaggttggagttaattagattgttgtttagatcgaatttatttttttattggttattggggtttttgggatttttttggagggagttcgaagaattagagtattcggcgcggggttttggcgtagggtcgtaggttttaggtattttttgtttacgatttttgatttgggtagtagtcggaggacggagtttagttttgggcgggtttggggaagaaaggagataggcggtacgggggtgagggttgttattagggggttttagagcgaaattttaggtttttatttggttaattttttattttggagttgagtttggttgcgggattggggaagggaaggagcggagttggatgttttgggggtggggttttaggttggaggggtttagttttggagaaacgggcggagttcgagaaaggttagggtaggtatggtttgggcgtggtttttataaattttttgggtttattggttatattttcgagttaattttgagatttcgattttgatttcgtaattttaattcgttggatttgattttatattgacgtttttgggttttatttttttgtttttagggattttttgaagggcgtggattttacgtaggggtttcgtgtttgaatacgtggttttaggtaggtcgcgttggatcgtagagttcggatttttaggaggggttgcggagtagagcgaggatttttaagaaggaatttgtgggggtttcgagtgtgtgggagggggcggaagtatagagttgggttttatcgattcgatttttaaagtttttattatcgttattttttaatttcgtgttttagttttttttaagtttttatgtggtttagggaaggagtgttcgcggaattggaatttcgcgggtttgtcgtttttatttatttattttaattttatcggtagcgggttttcgtgggtttgtgttttttacgcgtgtatacgtacgcgtagatttcggtttttgtttcgtttattttttcgagttttggggtttagtcggttttagtttttttttgtcgtcggcgttattttagaaagttgtgggtattcgggagcggagcgtcgcgggtgtgttgggcgtcggtggaggggggaatagcgaggattagacgtcgggaagtatttttttaatatttgcgagaggtagatacggcggaatttagtgggttagttagtttttttttcggagattttggggcgtttgcgttattgcggagaggcggcgggatgggtcggatgatttttattattattttttattttgttgaggttattatttttgggcgttgtttatttttttaaggttgtattatttacgtagttttcgcgtatttttcgttatcgtagagggttggggtcgttttagttttcgtttcggtcgatggggggaggggatgggggaagtggtagagtggttgttgcgtcgtcgtttttttggttgttttttcgtcgaatttatgtatagagttgtgtaaatgaggtcgggcgggtttatttgtattttatgttaatgagtagattttttaagtgttttttttttttggcgggagtttttgtttttattttgagtatgcggcgtttgagttttgaatttcgtgtcgttttttgggaaaggggggttatttatggttgtttcgcgcgtttgatatttttttttttttcgagaggtcgtagtttgtcgggtcggtttgtttttttcgttaggatagaggtttcggggttggcgcgagaagtagggacgtttaatattttttttttgtagaggggaaaatgaggatagagaggttggtttagtttaatgattaggttttttggtggttagtaggttttatatttttatttattatttcggttatttttgggttttggattgaattttgttttagaatatgttcgaaaggagggtaggtataaacgtattatttagataaattgagatttatatgtatttttttgggtttaggatttaggggagatcggttacgtaagataggatttgatttttgtattcggtatgttggggttgatggttagtcggagatgtttatttttagtttgagtgttagagaggaggtagaggtagaatttatagggaaggtaaagaagatttgaaattatttttatttaattttagttttttaagttttagttttgatattatttttttagagtggttttttttttagtaagtattttaatgttatttaagtgttaaggtgtttaggatatagtatcgagttagatataagtttggaattttatagtatttagtttaggttgggattatatgtttgtgtttgtagtaatgaaatgattatttttttatttaggttttgtgtttttagaggggttatgtttattttgtttattagggttttgtttagtgtcgggtataaagttgttaggtgaatgaatgattttaggtagggaaagggaaataaagggataagaaatttttttttttgggttttagttttttaataaagatattaagtttaattaagagtttttttgggtttgaggaagaattttttttatatatattttgtttagttagtttttttagttttttttagttttgtttttattttttttttatagtttatttggttttttgcggagttaagataatttttttatttgtgatattttttgtttagggatgatataattattattttatttagttattttaatagttttgagagttgggtggatggttttttattttttagataaggaaggggggtgtttagaatgatgaagttatttaagtgatcgtttagacggtatggttttgtttttagtgattttggttcgtaggtgtttcgttggtagaatagggtgtatatttaagagggattagtaaaggggaagggatgttgtaggaatttttataattttgtttttgagtgagatttatgtgggattttgttttttttagaaattcgagtatttttgggagaattaattttttaaggaggtaattttttttttttaatttatttatagaattttattatcgcgtgtatattttattttaggagggagagaggagttgtcgagtagaaagtagattggttgtagggatagaagatattaagggtatttttttttatagttgcgtttggattttttgcgagaagaggaagttttaggggtttttattgtatttttaagattttagagagaaatagaagtgttgaggggtcgtaggtaggttttttattttttttgggtttcgaatatttatttataggaggttgaaggtaattgtttcgtaatttatttatgagggttaatgggacgatagtggtaagaggggttggtatattgtttagattgttttaaagttagggttggggttgttaaaaaggttatttgtgttttattatgttttatttttttttttttttatttttttaggttgggttttatttgtttagttttttgattttttggtaaggttgagtaggttttagttaggaaggggttagttgattttgttggtcggagtattaattttttttagatgggttggtggtttgtattgagggtttggttgtttagatagagttgattttggttttagtgattatgtgtggttatgtgtgatcgtgtgaagggagtaattttatttagtttttcggtttttttttgttttatttttttttattgttgatattttttataagtagtggttttatgaaggtttttttgtttttagtagttttttttggttttttgtgttgtttagttggagggttgaggatgtttggtatagtcgatttttaaaggttttagagggatagtttttttttttgttttttttatttcgttagttttattattttgtatttgttttttttaaagtatgtgttttagtttttattttttaatttaaggaagatgtatgtgttaaggataggatttaggagtattttttaatatttaggggaaaggatgaggttataggaaggttttttttgtagtaagaaggatttagataga

SEQ ID NO: 82 - DNA, 3720 bp, Artificial Sequence
  chemically treated genomic DNA (Homo sapiens)
tgtagttgtttattaaaattttatatatattttggtatataattatattcgttggaatttattttatagatatatttatatttatatagttaaggatgttgattttaataatattggtataagtaaaaagttggaaattgtttatatgtttatggataggggataaatcgattaatttaaggtttttttttataatggagtattatatagttttgaaaaagaatgataagatttttatgttaggatatggtataatttttaagttattttaagtgaaaaaataataataataataatattgtagaataatgtgtatggttggatatatataaatttttttgaaagaatatttaagaaatttaaatgtggttattttaggagttaggaatgaggtaggtggagaggagggatttttattttttaatttagaatatattttgttgtgttagttgattttttttttattgttaataagtattatagttttttttaatttaaattattttttttagtataaatttaaaaaaaaaaaatttaaaatggaaaaatatataggcgtgagtaaaagaaatgaatggtaataatttttgtggtttattgagtgcgtttggatatttatgtgtttttagtttttttttataggaaatgtataggtgagaaattgacgttaagggggattgagtgttaagttagttagtggtagagggtagatttaaatttaatacggtttttttttgttgtttttcggtttttgtttttaggtgggaagcgtatttatcggacggtcggttcggtgaggcgtagcgttttagattggcgtattcgcggttttagcgttttacgtttggggagcgcgcgcgtacgtagcggcgcgagtttggcggcggcggcgataataataacgttatagttcgagttttttttttcggagttttcggtatatattttgtgtttatgtttgggtatttacgttacggcggtagggtcggggttttttaaaatggtagtggttcggggagtcggaagttcggagttagcgtcgtcgtagttatataagtgggggggttgtgggttgggggagttcggtagcgttttggagaggcgaggagtcgtcgttcgaggtcggtgcgggcgagcgagggcgtcgcggtttttcgattttttttttagaggtgagtgttcgaagttaggagttcggcgtttataggtttgtgcgttgcggggaatttttatcgttagttttttcgttattcgcgcgtttttaagtttagcgggcgaggtttcgggcgttttatagtcggcgtcgcgttatgttttattttagcgagtttttcgaattcgacgcgtttttcgttaagtttattgaaggttgttgcgtcgaatttagcgttgaattgtttcggttgtttgttagggacgttttcgcggttatcggttattttggaggtaaggagggcgagtaggggtgtttagacgacgacggcgtagcgcgggggcgtattatatttgagaattaggagggattgggatattggagttatgagaataggggcgatgggaagtttaggagttttggggtgcgtatttttatttttatttatattgggtcgttagcgttttcgtaggaatttgtgcggttatcggagcgtttttttgtttgtgtacgtgtgttttgcgtgtgtatgtttttatgtgttttttgggacgtatgcgggtttttgttgaattagaatgtgtaaaaggtattttgtgtatattcgtgggtattaagagttttgtaggtaggggttgtggatttaggtgtattttttgatgtgtttagagttgatttttgttttttttttagtaggcgattttttgagttgggttttgaatagttgcggcgtaagtggggatttagtcgatttttgttttttggaggggtttgcgtttatattttttttcggttttagttatagcggtagtttttttatttaggtagtgttcgaatattcgtacgattcggaggtattttttaattttatgtcgggcgttttaggtttggtattttttttcggtttagaggtagtagcgtttagattttcgttggatgtttttttttttgcggggttcgatgttttgttgtcgggttcgtcggatttttatttttcggatttgggcgttgttttttttttagaggcgttttgggaggtttcgttttgcgcgggtgttttttcgtagtgtttgtatgagttttagtttttttcgttcgacgttaagttcggttttcggcggtttttcgtttcgttagcgttggacgttgtttttgtttttaagggtttttacgcgttttgggagttgttttttgtgggggttttagggaattgtgggttatagggagattattaggtcgtttcggaggttcgttttttcgtaatagggattaagattgaggatttgttgtttattagttgttttgcggaattgtcggtcgttttagttaatagattttattttagcggggtttatgacgttttttcgttggtttcgggtgatttaggggagggggttgagggtttttttgggtttttgattttttttagtggggagggagggagtagcggcgacggcggagagtttttggttagtacgtagttttagtttttttcgttgggttttcgtagcgtcgtcgcggcggatttttttaaatttttggtggcggatatttttggaagtagtggcgtggttgtattattcgtgtcgtcgtcgtcgtttattttttttttttaggttaaggcgcgacgtaaggggcgtcgcggcggtaaatgtagtacgcgttgtttttgttcgcggtcgtacgttaaggttttcgtttgttcggtggagagttgtgtgcggagttttgcgcgtttcgacgagtttaatcgttatttgcgtatttatacgggttataaatttttttagtgtcgtatttgttttcgtaattttagtcgtagcgattattttattagttacgtgcgtatttatatcggcgagaagttttttgtttgcgacgtgtgcggtcgtcgtttcgcgcgtagcgatgagaagaaacggtatagtaaggtgtattttaagtagaaggcgcgcgtcgaggagcggtttaagggtttcggtttttattcgttgggtttttttttcgtttttttttgagtaagagatgggtttatgggttggggcgtcgtcgttcggcgcgtacgagtttcgggtcgttttttttttcgttttttttttaattttttttcgtacgttcgagggtcggttttcgtttcgtttttagtttttttgaagcgttcgtcgtatacgttttatttagtattagttcgtcggatagttttcgcggtttaggcgttgttatttttgttagtcgcgttttgggggaagttttttgagattatttagtgaataggtattattttgggatttaagatagttttttgtaattgtatacgttttacgtttttttttataatttttagagataggttggggtaggttaaggcggtttcgcgcgggattttgtatagtagtgttttatttagtagtcgattggatgtaacgttttgttttgggttttttttttttttgttgttgttaatttttgtaaagtagacgttatttttaagtagttgataaaattgtttatttttgtaattaaaattattgtgttaaaagtttattgaatttgttatgtaagttttt

SEQ ID NO: 83 - DNA, 3720 bp, Artificial Sequence
  chemically treated genomic DNA (Homo sapiens)
aggagtttatatggtagatttagtaagtttttagtataataattttaattgtaaaaataaatagttttgttaattgtttgagagtagcgtttgttttataaaaattaataataataaaaggaaaaaaaatttaaagtaaaacgttatatttaatcggttgttggataagatattgttgtataaagtttcgcgcgagatcgttttggtttgttttagtttgtttttgggggttatagaggaaggcgtggggcgtgtgtagttataaaagattgttttgaattttagggtagtgtttatttattgggtggttttagaagattttttttaaagcgcggttgataagggtgatagcgtttggatcgcgggaattgttcggcgagttggtgttgaatagggcgtgtgcggcgggcgttttaaggaaattggaagcgggacggaggtcggttttcgggcgtgcgaggaggagttggaagaagagcggggaggggaacggttcggaattcgtgcgcgtcgaacggcggcgttttaatttataaatttattttttgtttagagagaagcgaaggagaggtttagcgagtaaaagtcgaggtttttgagtcgtttttcggcgcgcgttttttgtttgaggtgtattttgttgtgtcgtttttttttatcgttgcgcgcgaagcggcggtcgtatacgtcgtaagtaaaaggtttttcgtcggtgtgggtgcgtacgtggttggtgaggtggtcgttgcggttgaagttgcggaggtagatgcggtattggaagggtttgtggttcgtgtggatgcgtaggtggcgattgagttcgtcggagcgcgtaaagtttcgtatataattttttatcgggtaagcgaaggttttggcgtgcggtcgcgggtagaagtagcgcgtgttgtatttgtcgtcgcggcgttttttgcgtcgcgttttggtttgggggaaaggggtgggcggcggcggcggtacgggtggtgtagttacgttattgtttttagggatgttcgttattagaggtttagggaagttcgtcgcggcggcgttgcgaaggtttagcggggaaagttgaggttgcgtattggttagaaatttttcgtcgtcgtcgttattttttttttttttattaggaggggttaggagtttagggaggtttttagtttttttttttaagttattcggggttagcgggaaagcgttataggtttcgttgggatagagtttgttggttgggacggtcggtagtttcgtagggtagttgatggatagtaagtttttaattttggtttttattacgggaaaacgagttttcggggcggtttggtagtttttttgtgatttatagttttttggggtttttatagaaagtagtttttagggcgcgtagggatttttgaaggtagagatagcgtttagcgttggcgaggcgggaggtcgtcggaggtcgggtttgacgtcgggcggggagagttgaggtttatataggtattgcgagggggtattcgcgtaaggcgaggttttttagaacgtttttgggaaaggggtagcgtttagattcggggagtaaaggttcggcggattcggtagtaaggtatcggatttcgtaggaaaaggggtatttagcggggatttggacgttgttgtttttggatcggggaagggtgttaggtttaagacgttcgatatgaggttgaagagtgttttcgggtcgtgcgggtgttcgggtattgtttgaatgaagaagttatcgttgtagttgaggtcgggagggggtgtgggcgtaggtttttttaggaagtaggagtcggttaagtttttatttgcgtcgtagttgtttaaagtttagtttaagaagtcgtttgttgaggagggagtaggaattagttttgggtatattaaagggtgtatttgagtttatagtttttatttataaaatttttggtgtttacggatatatataaagtgttttttgtatattttgatttagtaggggttcgtatacgttttaaggagtatatagaaatatgtatacgtaaaatatacgtgtataggtaaaagggcgtttcgataatcgtataggtttttgcggaggcgttggcggtttagtgtgggtgggaatgggggtgcgtattttaggatttttaagttttttatcgtttttatttttatagttttaatgttttagttttttttggtttttaggtatggtgcgttttcgcgttgcgtcgtcgtcgtttgagtatttttgttcgttttttttatttttagggtagtcggtggtcgcgggagcgtttttggtaggtagtcggggtaatttagcgttgggttcggcgtaatagtttttagtggatttgacgaggagcgcgtcgggttcggaaaattcgttaaggtggagtatggcgcggcgtcggttgtggggcgttcggggtttcgttcgttgggtttgggggcgcgcgggtggcggggaggttggcggtaggggtttttcgtagcgtatagatttatgggcgtcgggtttttggtttcgggtatttatttttgggaaaggagtcggggagtcgcggcgttttcgttcgttcgtatcggtttcgggcggcggtttttcgtttttttaaagcgttgtcgggtttttttagtttatagtttttttatttatatagttgcggcggcgttggtttcgggttttcgatttttcgggttattgttattttgggaggtttcggttttgtcgtcgtgacgtaaatgtttaaatatggatataggatgtgtgtcggggatttcgaaaaggaaagttcgagttgtgacgttgttgttgtcgtcgtcgtcgttaggttcgcgtcgttgcgtgcgcgcgcgttttttaggcgtggagcgttggggtcgcggatgcgttagtttggggcgttgcgttttatcgggtcgatcgttcggtagatgcgttttttatttggaggtagaggtcgaggggtagtaggggaggatcgtgttgggtttgaatttgttttttgttattaattagtttgatatttagttttttttaacgttagttttttatttgtgtattttttgtggagagaaattgagagtatataaatgtttaggcgtatttagtaaattatagagattattgttatttattttttttgtttacgtttgtgtgtttttttattttaagttttttttttttaaatttgtgttaggaaaaataatttaaattaaaaaggattgtaatatttgttaatagtaggaggaaagttaattagtataatagggtatattttaaattgaaaagtaaaagttttttttttttatttattttatttttagtttttgaggtagttatatttaagttttttgggtatttttttagaagaatttatgtatatttaattatatatattgttttgtaatattattattattattatttttttatttgaaataatttagagattgtgttatgttttgatataaagattttgttatttttttttaaggttgtatagtattttattgtaagggaggattttgagttagtcgatttattttttatttatgagtatgtaggtagtttttaattttttatttatattaatgttgttggagttaatatttttgattatataaatgtgaatgtgtttgtgagataaattttaacgagtgtaattgtgtgttaaagtatatgtaaaattttgatagataattgta

SEQ ID NO: 84 - DNA, 8759 bp, Artificial Sequence
  chemically treated genomic DNA (Homo sapiens)
tagtttggaagagggtagttaggggagaagttagggttggagttatgagaaaggataagatgagatgatggttttaatattgaggatagaaagaatattgagatgagaaagtagtttattataagtatttatgtaaaggaaatagtagatgtttataaattagtagaggtaataattttgaaagtttatttataagtttttttttttatttttaatttagtttaaatgtaattatttaaattgttttttatttttttttttggattatgaatgagttttttaaatgtagggtttatagtgttttatttattagtgaattttaagtgtttagtatagagtttggtaaatagtaaatgtttaataaatattcgtttagtgtatgaattggagtgattttttattttgtttataagttgaaaaaaggtttattatatatttaaatatgttgaaattatagggtatttggtaattttttaaaattaaaatttttagtttggaaatagaattttaattttgtgaaaataaaatttatttatttatttaaaaaatatttattaaataatgattatgttttatattaggttgagttttaaggatttaatgatgaataaaaattaatatgatttttgtttttaggaaatatatagtttagtgaggaaaatagattgtgagaagttttttaataaatattgggtgttattaaaatatattaaaaggtgagtgggtgagggatttgagttagtttaggtggtttaggaagtttttttggatgtgttgatatgtataggtattaattagataaatagagagaaggatgaattaatattgtaggtagagggaatagaatatgtaaaggtaggaaggattatggagtcgttggaggatttgaataaaggttagtgtaagtggattttagaaaataggaggaaaggtgtatgagatgagattagagaggtagattatgtggggtatggttaatgttttggatttttttattaagagtaatggggagatagtgataggatttaaacggggaaataatatgattagattaaattttttaaaaaattttttatgtaaatatatattgagagttaattattgataaagatttaaaggtaataaagtggagagagaatagtatttttaaaaaatggtgttaaaataataggatatttatattaaaagttgggtatttgtttataaaatttaatttaaaatggattatagatttaaatgtaaaattgaaagttatataatttttggaagaaaatatagatgggaatttgtgtgattttgagtttgaaaatgatttattatatttgatattataattcgtaagttaatataatttataagtgaataaagtgatgaattggattttattagaatttaaaatgtttgtgttttaaaagatattggtatgataatgaagataaattatagataagatattgttgaattatatttttgataaaggaattgtgtttagaatatataattttaaaatttttataataaattataagtagtttaattaaaaaaaaaaaaagagaaaaaatttatagtttttattaaagaaagtatataattgtaaaataagtatatgaaaaatgttttgtatttttatttatgggagaaataaaaattaaatgggaaagatatttttaattagaatattaaaattaaaaagattgattatattaagtattggtgaagtggaaatgtaaaatgatataattatttaggaagatgatttggaagttttttataaaagtaggtgtatatttattttgtgatttatttattttatggttaagtatttatttgagagaaatgaaagaatatatttatataaagatgtttatataaatatttatagtagttttatttgtagtagttttaaattgaaaagaatttaaatgtttattaaaagtgaatggataaataaagcgtggtatagtaatgtaatagaatattatttagtaataaagaagaatgagttagtgatatatataatagtttaaatgtatattaaaggtattgtgtttagtgaaagatgtaagtaaaaaaaaaaaagagtatatgttgtatagttttattgatataaaattttggaaagtgaaaaatagtttatattgatagaaagtagattattggttgtttgaggaggaggagtataggagaggtggagggaaaatgtataaagtggtataataaaaatttttggaattatagatatatttattattttgattgagtgatgattttatgagtgtacgcgtgtgttaaaaatgattaatttatgtaattttaaatatgtgtagtttattgtatatattaattatattttagtacggttattaaaaagaaattttttggttgtataatgtagaattgattttaggaaagagtggagggaggatgattatttatagtgttttaggtggaagagaacggtgttttttggaagtgaattaggttggtaataatagagatgaaataaatgggtagatgtgtgagatatttaggaaataaaattcgatggttattattttttaaaggttagtttattttggttttttagagtaaagagttagggaagattttattaataaattttttttgaagttgtagaggaagtttatagtagaaatttatttttaatttgattaatttgagagaatatttttggttttatttgattattaaaaaattgtaaagaataggaggagaaagaagaagaaagttggtataaatagtgaatttatataatattaattaataattgttttttgtttttaaaagtaatgggaagaaaatgagatttgagttggaagattagagtttaaaatttaaataaagtatatggttttaatatgtttatagtagttaattttttttgataatgatataattgttgatagtattatttttaaaaataaaaataatatagtaattttttagatttgtagaatgtttttttgtttataagtttgttttatatatattatgttttttaaatgatatattagttttttgagggtaatttatattggtaatagtttttagatgtggaaattgtgaagataatgttggtgatgtggaagtaatataaattttggagttttttagatttaggtttgaatgttagattgttttttatttagagtaattttagagtattattttttattttaatttttttttaggtttttttgtgtttatgtgttttttttatttttgtttattgtttatttagtgatttttgtatttttttttattgttagtgtgtagatatatagtttttttggttttgagatttatgttaattttattttattattttgttagtttatttaatttttattgagtaatgttagttgaaagttgtggtgggattaaatgttgtaatgagtatttaaatgaggttgaagtatttacgtattttatttatatatggtgaggtatatttaaggaaggttgtagttattaaaattttaggaaataattttttatttttttaggtgaaagggtttttaggtttttgtgttttggaaggtttatttatagttattttttaaatgataatgcgattgatgagtttagagtttagtttaaatagtaatggattggaagattagtttaggttttattaatgtggaatatagaataaattatgtttttgttttagtttgtttatttgtgaaatagagtttattatatttagttttttttgtttttaggtttgagttattttttttggttaaggtaagtaaatgtttatgatgtttggttgtgtataagataaagttataataaagttataatttattttttttttgtagaagattgtaaaaagtaaaagagatttaggtaaaaatttcggaatgatttttggaatagagagtttttttagaattagaagttaaaggaatttaaaatatagggaggtttagggtttttattgatataaaggaaagatgttttttttataggtttacgtttatattttttttttttttttatttttatttgtatttttatttttatatagggtttatgggattttttttataaaagagtagttgtagtaatttatattattttttacgtttggttgtttattaagaggcgaaaagtagttttatataggttttatttttggatagttttagttgtaaagtttaaaatatgcgaaggtaatttggaaaagtaagcggttgtatataaagtaaacgtttatagagttttggataaaattgagcgtttatgtgtatatggtaagtgtttttagtgtttgtgtgtttatttgtttgtttgggtgattttgtttttgagagtttggatgagaaatgtatggttaaaggtaattttagataggaagaaaggtagagaagagggtagaaatgatttttgatttttggggttgagggtttttagagtaaatggtataatgttacgaggttcgatttatttttatgacggaatttaaggttttagtaagtatttgttggtttggttatggtttgttttttagtttgtaggagatttttttatttttttatttgcgcgtttttattagttttgaaaagaatttttggtagttaggagtaggtatttttatcgttttttttttttttttttcgtttttattttgttggttttttagattgggttttggaattaaatttggtgagtgttggtttttaggaaatttggagttttggcgtttaaattttggtttaggaaagtaggagttatttaggaagtaggggttttttagggttagagttagttttttttgttttcgtttacgttgcgttagtatttgtttttttaaagttattaggtaggcgttagcgcgcggtgaggggaggggagaaaaggaaaggggaggggagggaaaaggaggtgggaaggtaaggaggtcggttcggtgggggcgggattcgattcgtaaattgttgtatttgttttttattttttagcgtttttttcgagatttcggggagttagtttgttgggagagcgggacggttcggagtaagtttagaggtagaggaggcgatagagggaaaaagggtcgagttagtcgttttagtgttgtataggagtcgaagggacgtattacgttagttttagttcggttttagcgatagttaacgttttttgtagcgcggcggtttcgaagtcgtcgttcggagttgttttttttttttcggtgaagtttttaaaagttgttaaagattcggaggaagtaaggaaagtgtttggtaggattgacggttgtttttgttttttttttttttatttcgtttttttttattttgttttttttttttttttcgttttttttttcgtagttgttttagtcggttatttttagttaattttttttattatttttttttttattcgttttttcgttttcgtcggtttagcgttgttagttcgagtttgtagagaggtaattttttttggttgcgagcgggcgagttagttgtatattgtaaagaaggtttttaggagttaggcgattggggagcggttttagtattgtagttacgattcgtttggttaggttgtacgcggagagaattttttgtttttttttattttttttttatttttttttgttttttttatttcgagtgcggagttagagattaaaagatgaaaaggtagttaggtttttagtagttaaaaaataaaataaataaaaataaaaaagtcgaaataaaagaaaaagataataatttagtttttatttgtatttattttagtggatattgaatttggaaggtggaggattttgttttttttttttaagatttgggtattttttgaatttattttttaagtattaagagatagattgtgagtttagtagggtagattttgtttatcgtgtgtttttttttgtacgagattttgaggttgttagagcgttttttgcgtggttgttttcgtaagtttttttttttggagtttttcgtaggtgggtagttagttgtagcgattatcgtattattatagtttgttgaatttttttgagtaagagaaggggaggcggggtaagggaagtaggtggaagatttagttaagtttaaggatggaagtgtagttagggttgggaagggtttattttcggtcgtcgtttaagatttatcgaggagttttttagaatttgttttagagcgtgcgcgaagtgatttagaattcgggttttaggtatttagaggtcgcgagcgtagtatttttcggcgttagtttgttgttgttgtagtagtagtagtagtagtagtagtagtagtagtagtagtagtagtagtagtagtagtagtagtagtaagagattagttttaggtagtagtagtagtagtagggtgaggatggttttttttaagtttatcgtagaggttttataggttatttggttttggatgaggaatagtaatttttatagtcgtagtcggttttggagtgttatttcgagagaggttgcgttttagagtttggagtcgtcgtggtcgttagtaaggggttgtcgtagtagttgttagtattttcggacgaggatgatttagttgttttatttacgttgtttttgttgggttttatttttttcggtttaagtagttgtttcgttgattttaaagatattttgagcgaggttagtattatgtaatttttttagtaatagtagtaggaagtagtattcgaaggtagtagtagcgggagagcgagggaggtttcgggggtttttattttttttaaggataattatttagggggtatttcgattatttttgataacgttaaggagttgtgtaaggtagtgtcggtgtttatgggtttgggtgtggaggcgttggagtatttgagtttaggggaatagtttcggggggattgtatgtacgttttatttttgggagttttattcgttgtgcgttttattttttgtgttttattggtcgaatgtaaaggttttttgttagacgatagcgtaggtaagagtattgaagatattgttgagtattttttttttaagggaggttatattaaagggttagaaggcgagagtttaggttgttttggtagcgttgtagtagggagtttcgggatatttgaattgtcgtttattttgtttttttataagttcggagtattggacgaggtagttgcgtattagagtcgcgattattataattttttattggttttggtcggatcgtcgtttttttcgtcgtttttttatttttacgttcgtattaagttggagaattcgttggattacggtagcgtttgggcggttgcggcggcgtagtgtcgttatggggatttggcgagtttgtatggcgcgggtgtagcgggattcggttttgggttatttttagtcgtcgtttttttattttggtatattttttttatagtcgaagaaggttagttgtatggatcgtgtggtggtggtgggggtggtggcggcggcggcggcggcggcggcggcggcggcggcggcggcggcggcggcgaggcgggagttgtagttttttacggttatattcggtttttttaggggttggcgggttaggaaagcgattttatcgtatttgatgtgtggtattttggcggtatggtgagtagagtgttttattttagttttatttgtgttaaaagcgaaatgggtttttggatggatagttatttcggattttacggggatatgcggtaagtttttttttttagaaatgtcgtttttcggtttagggtagagttattttgtgttttggggtatttagcggtttttatttgcgcgaatatttagattgtttttgggagagtttagtagggtaaatttagagttttttcgtggattttcggtttgttagaggtttaatttgagtttttttaatttttgttgcgtgttttgggtgttgatttttgtttttttagattttttaatttttttaatcgttttaaatttttattattttttggtattcgaggttttaaatagaaattttattgtacgggttatttttagagataaagtttttaagttttttattttttttttttttttgtttttaaagtttgagaattttaataggaatttgggtaattttttttttttaggtttgttaggattttatttttagtttgcgtagattagagttaaaaagatcggtttaatagttttttagcgggtattttttagagaggtaaagtgaaattttcggttagggaaagaaagtggtttttgggtgttgaggtttgttgtgtgaaagggtgaattttttttttttgaagtaattggggatttgttttagggttggaggttagtagagataatttaaatcgttatgtttagagtaggtagaggggtaatttttttggtaaagattttataggatttgtatttatagttttttaacgttggttgattatgttgaaagtagttgtttgggtcggtttttttttgtaaagtgtttattttttttgtggattataatagatttatagttttttattttaggtttgtattagatttataaagaggagaatatttttttaatgtataatttaattaggtttgattttgatttataaaattgttggaaaatatttttttgtaaagtattttttgttattttagtgtgttttaaaatttttattggggagggtggagtgaggttttttattatatttttttatttttaggatatgtttgtattttagaatatgtgtagttagtt

SEQ ID NO: 85 - DNA, 8759 bp, Artificial Sequence
  chemically treated genomic DNA (Homo sapiens)
agttaattgtatatattttaaaatgtaaatatgttttaaaaataaaggaatataataaaaaattttattttattttttttagtggagattttggagtatattgaaatagtaggaaatgttttataaaaaaatgttttttaatagttttgtaagttagagttaagtttaattaaattgtatattaaaagaatatttttttttttatagatttgatgtaaatttgaagtagggggttgtggatttgttataatttatagagaaaataaatattttataagagaaaatcgatttaagtaattatttttaatatagttaattaacgttgagaaattgtgagtgtaaattttgtgaagtttttattaagaaagttgtttttttgtttattttaaatatgacggtttggattatttttattgatttttagttttggagtaagtttttagttgttttaggagaaagaagtttatttttttatatagtagattttagtatttagagattattttttttttttaatcgagaattttattttatttttttggaggatattcgttgagaagttattgggtcggtttttttgattttaatttgcgtaggttgaaagtgaaattttaatagatttgaagaggagaaattgtttaaatttttgttgaggtttttagattttgaggataggaggaaaggaagagtggagggtttgggagttttatttttgaaggtggttcgtgtaataggatttttgtttgggatttcgagtattaggaggtagtgagaatttggggcggttgggggagttgaagaatttgggagggtaggaattagtatttagggtacgtagtagaaattaggagagtttaggttaaatttttggtaggtcgggagtttacgggagagttttaggtttattttgttgagtttttttaggggtaatttgagtgttcgcgtaggtaggagtcgttagatattttagaatatagagtgattttgttttgggtcgaaaggcgatatttttggaaggaaaaatttatcgtatgttttcgtaaggttcggagtagttatttatttaggggtttatttcgtttttgatataagtgggattgggatagggtattttgtttattatgtcgttagggtattatatattaggtgcggtgaagtcgtttttttggttcgttagtttttgagggggtcgagtgtagtcgtagggggttatagttttcgtttcgtcgtcgtcgtcgtcgtcgtcgtcgtcgtcgtcgtcgtcgtcgtcgtcgttattatttttattattattatacggtttatataattggtttttttcggttgtgaagagagtgtgttaggatgaggaagcggcggttgagggtgatttagaatcgggtttcgttgtattcgcgttatgtaggttcgttaggtttttatagcggtattgcgtcgtcgtagtcgtttaggcgttgtcgtagtttagcgggttttttagtttgatgcgagcgtggggatggggaggcggcggagggggcggcggttcggttagagttagtggaaagttgtagtagtcgcgattttggtacgtagttgtttcgtttagtgtttcggatttgtagagagatagggtagacggtagtttaagtgtttcggagttttttgttgtagcgttgttagagtagtttaggttttcgttttttagttttttggtgtaattttttttgaaaggggaatatttagtagtatttttagtgtttttgtttgcgttgtcgtttagtagagaatttttgtattcggttaatggggtataaggagtgggacgtatagcgggtggaatttttaaaagtggggcgtatatgtaattttttcgaagttgtttttttggatttagatgttttaacgtttttatatttaggtttatggatatcgatattgttttatataattttttggcgttgttagaaatggtcgaagtgttttttaagtaattgtttttggaggaagtgggagttttcgaggtttttttcgttttttcgttgttgttgttttcggatattgttttttgttgttgttgttgaaggagttgtatggtgttggtttcgtttaggatgtttttaaggttagcggagtagttgtttaagtcggggaaagtggggtttagtagggataacgtggatggggtagttgagttattttcgttcggaggtgttggtagttgttgcggtagttttttgttggcggttacggcggttttaggttttgggacgtaatttttttcggggtggtattttagggtcgattgcggttgtgaaggttgttgttttttatttaggattaggtagtttgtggggtttttacgatgggtttggggagaattatttttattttgttgttgttgttgttgtttggggttagttttttgttgttgttgttgttgttgttgttgttgttgttgttgttgttgttgttgttgttgttgttgttgttgtagtagtagtaaattggcgtcgggaggtgttgcgttcgcggtttttgggtgtttggggttcgggttttggattatttcgcgtacgttttggaatagattttggaaagtttttcggtaggttttggacggcggtcgagggtagattttttttagttttaattgtatttttatttttgagtttggttgaattttttatttattttttttatttcgttttttttttttttgtttagaagagtttaataggttgtgatgatgcggtagtcgttgtagttagttgtttatttgcgggaagttttagagaaggaaatttgcgggagtaattacgtaaaaagcgttttgatagttttaaagtttcgtgtagaagaagatatacggtggataagatttgttttgttaggtttatagtttgttttttaatatttgaagggtagatttaaaagatgtttagattttaaaagaaaaaaataaaattttttattttttaaatttagtgtttattgaagtaggtgtaaataagaattgagttattattttttttttttatttcggtttttttgtttttgtttgttttgttttttggttattgaagatttgattgtttttttattttttgatttttggtttcgtattcggggtggggaaggtaggaggaggtggagagagagtgggggaaaatagagggtttttttcgcgtgtagtttaattaggcgggtcgtggttgtagtgttgaagtcgttttttagtcgtttggtttttaagagttttttttgtaatgtgtagttagttcgttcgttcgtagttaaagggagttatttttttgtaaattcgggttggtagcgttgggtcgacgggggcgggggggcgggtggggagaagggtggtgaggggggttggttgagagtagtcgattgaggtagttgcgggagagaagacgggggagggggggaaggtagggtggggggaggcggggtggagaggaggaggataaaggtagtcgttagttttattaggtattttttttgtttttttcgagtttttagtagtttttaaaaattttatcgaagaggaaagggtagtttcgggcggcggtttcgaagtcgtcgcgttgtaagaggcgttggttgtcgttggagtcgggttggggttggcgtggtgcgttttttcggtttttgtatagtattggagcggttagttcggttttttttttttttgtcgttttttttgtttttgggtttgtttcggatcgtttcgtttttttagtaagttggtttttcgggatttcggagggggcgttgggaggtggagagtaaatgtaatagtttgcgagtcgggtttcgtttttatcgggtcggtttttttgtttttttattttttttttttttttttttttttttttttttttttttttttttatcgcgcgttaacgtttgtttagtggttttggagaaataagtgttggcgtagcgtgggcgagggtaggagaggttagttttagttttggaggatttttgttttttgaatagtttttgtttttttaaattaaggtttaggcgttagggttttagattttttggaggttagtatttattaaatttggttttaaagtttaatttaaaaaattaatagggtggaggcgagggagggaggaaaaggacgataggaatatttgtttttggttgttaggggttttttttaggattgataagagcgcgtagatgggagagtgggagagttttttataaattgaggagtaagttatgattaagttagtagatatttgttgaaattttagatttcgttatagggatagatcgggtttcgtggtattgtgttatttgttttaggaatttttagttttaagaattagaggttatttttatttttttttttgtttttttttttgtttggaattgtttttaattatgtattttttatttagatttttaaaggtaaaattatttagataagtaggtaaatatataaatattaaaaatatttgttatgtatatataggcgtttaattttgtttagagttttgtaaacgtttgttttgtatgtagtcgtttgtttttttaagttgttttcgtatattttaaattttataattggaattatttaaggatagaatttatatagggttgtttttcgttttttgatggatagttaggcgtagaggatgatgtgggttattgtaattgtttttttgtggaggaggttttataagttttgtgtaaaggtggagatgtaagtgggaatggaaagagagagaaaatgtaaacgtaaatttataaggaaaatattttttttttatgttagtagagattttgggtttttttatgttttaaatttttttgatttttgattttggggaggttttttgttttaaaagttatttcgagatttttgtttgggttttttttgttttttgtagttttttatagagaaaagatgggttgtagttttgttgtagttttattttgtgtatagttaaatattataggtatttatttattttgattaaagaaggtaatttaaatttaaaggtaaggaagattggatatgataggttttattttatagatgaataggttgaaataaggatataatttgttttatgttttatattagtaaaatttaaattagttttttagtttattgttatttgagttagattttagatttattaatcgtattgttatttgggaaatggttataaatgaattttttagaatataaaggtttgaagatttttttatttgaggaggtgaaaaattattttttgagattttaatggttatagttttttttgaatatattttattatatgtaagtagaatgcgtagatattttaattttatttgaatatttattgtaatatttaattttattataatttttaattagtattgtttaataggaattgagtgggttggtaggatggtagaatggaattaatataggttttagagttaggagaattatgtgtttatatattaatagtgaaggaaggtgtaaaaattattgaatgaataatggataggagtgaagaggatatatagatataaagaggtttgaaaaaaaattaaggtgagaaataatgttttgaagttattttgaataaaaagtagtttgatatttaaatttgggtttgaaagattttaaagtttatgttgtttttatattattaatattgtttttatagtttttatatttgaaaattgttgttaatataagttatttttagaaggttagtgtgttatttaaaagatataatgtgtatagaataaatttgtaaataggaaagtattttataaatttgaaggattattatgttatttttatttttaaagatggtgttgttaataattatattattattaggaaaggttaattattataagtatattagggttatatattttatttggattttgaattttgattttttagtttaaattttattttttttttattgtttttaagaataagagataattattgattaatattatataagtttattgtttgtattagttttttttttttttttttttttgttttttgtagttttttagtaattaaatggaattagaggtgtttttttagattagttaggttgagagtaagtttttgttataagttttttttgtaattttaagagggatttattaataaagttttttttagttttttgttttggaaagttaggatgagttgatttttggaaaatggtgattatcgggttttattttttaagtattttatatatttgtttatttattttatttttgttgttgttaatttagtttatttttagaaggtatcgtttttttttatttggagtattgtaaatggttattttttttttatttttttttagaattagttttgtattgtgtagttagagggtttttttttaatagtcgtattgaggtataattgatatatataataaattgtatatatttaaagttgtataaattgattatttttgatatacgcgtgtatttatgaaattattatttaattaagatagtgaatatatttatgattttaaaagtttttattgtgttattttgtatattttttttttattttttttatattttttttttttaggtaattaatgatttgttttttgttagtatagattgttttttattttttagagttttatgttaatggaattatatagtatgtatttttttttttttttatttgtattttttattgagtataatgtttttgatgtatatttaagttgttatgtatattattagtttatttttttttattgttaagtagtattttattgtattgttgtattacgttttgtttatttatttatttttgatggatatttgggttttttttagtttggggttattataaataaaattgttataaatatttgtataaatatttttgtatggatgtatttttttattttttttaggtaaatatttagttatggaatgggtgagttatagggtaggtatatatttatttttgtaagaaatttttaaattatttttttaagtgattgtattattttatatttttattttattaatatttggtatggttagtttttttaattttagtattttaattagaggtgttttttttatttaatttttattttttttatgaataaagatgtagagtattttttatgtgtttattttataattgtatattttttttgatgaagattgtaaattttttttttttttttttttttaattgggttatttgtaatttattatgggggttttagagttatgtattttgagtataatttttttattagaaatatgatttaataatattttatttgtagtttgtttttattattatattagtgttttttgaagtataaatattttaaattttgatgaagtttagtttattattttgtttatttatgaattatgttaatttacggattatggtgttagatataataaattatttttaaatttaagattatatagatttttatttgtgtttttttttagaagttgtatagtttttagttttatatttaggtttgtgatttattttgaattaagttttgtagatagatatttaatttttaatatagatgttttattgttttggtattattttttgaaaatattattttttttttattttgttgtttttgaatttttgttaataattaatttttaatatatatttgtatagagggttttttagaaagtttaatttggttatattattttttcgtttaagttttgttattgtttttttattgtttttaatagaaaagtttaaaatattaattatattttatatgatttgtttttttgattttattttatatatttttttttttgttttttgagatttatttatattggtttttatttaggttttttaacgattttataattttttttgtttttgtatattttgttttttttatttgtaatgttggtttatttttttttttatttatttagttaatgtttatgtatattagtatatttaggaagattttttgaattatttaggttagtttaagttttttatttatttattttttaatatattttaatagtatttagtatttgttggaggattttttataatttgttttttttattgaattgtatgttttttaagagtaggaattatgttggtttttgtttattattgaatttttaggatttagtttggtgtgggatatggttattgtttaataaatattttttgaataaatgaatggattttatttttatagaattaaaattttgtttttaaattgggagttttggttttggggggttgttaaatgttttgtgattttagtatatttaggtatgtaataaatttttttttaatttatgagtaaagtagagaattattttaatttatgtattgaacgaatatttgttaagtatttattatttgttaggttttgtgttaggtatttggaatttattgatgaataggatattgtggattttgtatttaaggagtttatttatgatttaggaaggagagtgaagaataatttaaataattatatttgaattggattggagatgaaaagaggggtttatgaataaatttttagagttgttgtttttgttgatttgtggatatttgttattttttttgtatagatgtttataatggattatttttttattttaatattttttttgtttttaatgttgaagttattattttattttatttttttttatagttttagttttaattttttttttggttgtttttttttaggtta

SEQ ID NO: 86 - DNA, 8404 bp, Artificial Sequence
  chemically treated genomic DNA (Homo sapiens)
aggaagttaaaaattttgaaaaaaggttagaggaattgttatttaaaataagtagtttagagaagaatataaatgatttgatggagttgaaaaatatagtataagaatttcgtgaagtatatataagtattaatagttaaagtagaagaaaggatattagagattgaagattatttttatgaaataaagtgtgaagataagattagaggaaaaagaatgaaaagaaacgaataaagtttttaagaaataggggattatgtgaaaagattaaatttatgtttgattgtttttgtatttgaaagtgatagggagaattgaattaagttggaaaatattttttaggatattatttaggagaatttttttaatttagtacgataggttaatattttaatttaggaaatatagagaatattataaagatattttttaagaagagtaattttaagatatataatcgttagatttattaaggttgaaatgaagttaaaaatgttaaaagtagttagagagaaagtcgggttatttataaagggaagtttattagattaatagtggatttttttgtaaaaattttataggttataaaagatgggggttaatatttaatatttttaaagaaaggaatttttaatttagaattttgtatttagttaaattaagttttataagtgaatgataaataaaattttttatagataagtaaatgttgagagattttgttattattaggtttgtattataagagtttttgaaggaagtattaaatatggaaaggaaaaattggttttagttattgtaaaaatatattaaattgtaaagattattgatattatgaagaaattaatgggtattaattaatgggtaaattaattggttagtattataatgataggattagatttatatataataatattaattttaaaagtaaacgggttaagtgttataattaaaagatatagattggtaagttggataaagagttaagatttattagtgtgttgtatttagtagatttattttatatgtaaagatacgtgttttaaataagggaatggaggaagatttattatagtaatggaaagtaaaaaaaaaaaaaagtaggggatgtaattttagtttttgataaaatagattttaaattaacgtagattagaaaaagataagaagggtattatatgatggtatagggattaatgtaatatgaagagttatttattttaagtatgtatgtatttaatataggagttattagatttataaagcgagtttttggagaggaagaaagagatttagatttttacgtaataatagtgggagattttaatatttcgttgttaatatttgatagattaatgagatagagtaattaataaggataattaggattttaagttagttttgtattatttagattaaatagatatatttaatatatatatatatatatatatatatatatatattttttgagatggggttttgtttttgtcgtataggttgaagtgtagtggtatgattttagtttattgtaatttttgttttttgggtttaagtgatttttttgttttagtttttagagtagttgggattataggtatttgttattatatttagttaatttcgtatttttggtagagatgtggttttattatgtttgttagtttggttttaaatttttgattttaggtgatttattcgttttggttttttaaattgttgggattataggcgtgagttatcgtatttggtttagattttgtcgaaattttaatatttttttggtaatgtaatagaaaattaaagattttgatggtgaatttaattgtttttgagttgtgtggatgaaaatatattttattatttttttttttaatttttaagtttttaggtatatgtgtaggatgtgtaggtttgttatataggtaaatgtgtgttatggtggtgtgttgtatagattaatttattattatggtattaagtttagtatttattagtttttttgatgttttttttttttttattttttttcgttataggttttagtgtgtgttgtttttttttttgggtttattttatggtatgtatgtgtgtatgtgtgtgtgtgtgtgtgtgtgtgtgtgtgtgtgtgtatttatttatgtgtatatattatgatatatatattatattttttttaaattattattttaggtttagggatatatgtgtaagtttgttatataggtaaattgtgtgtttttggggtttggtgtgtatagatttttttattatttaggtaataagtgtagtatttgataggtagttttttgattttttgtttttttattttatatttttaagtaattttttagtgtgtgttgtttttttttttatgtttatgtgtttttattgtttagtttttatttataagtgagaatatgtagtgtttggttttttgtttttgcgttagtttgttgaggataaaggtttttggttttatttatgtttttgtaaaggatatgattttatttttttttatggttgtaggaaaatatattttatatattagtgaatatagttaaattaatttatggttaagatatatatttttttgtaaattgagaaatttttttattataattgtaatatggtaataaataaatttagattatataaatgtaatttagatgttgataaattggttttaaataaagtaagtgatatttacgtatgaagagagtttattttagtttttagaatttttttttatttttttgttatttttatttttagtaagtaagtatttattgtgtgtgtaatattgtgttaggtattaaggtaatgatgatatttaagatttggtttttattttgaagataagtataggagaaatattattagttatgatgttttttgttgtaaataagtgaaaattttagtttagtttaggttagttttagggttggttaaattagaggtttatttataatattgaggatttagatttttttgaaattttttttgtattaatattagtatttttattttttttgtagggtggtttgttttacgttataatggttgtagtaattagaagtgttatatttttagtaatatttaatattattattattatttaataatatttagaattgtgttatttttgttttaatttattaggtttttagtagattattttttattttttaaatgttaaaattgtattttgagtttttgtttaaattaatttggggtgaggtgaatggaagtagtattttaattgtatttattttttgtagttggatttgggtttgggttattttttgatatttgtttataagaaagatttttgaagttaggtaggaatggttgttgagtaggttagtgtttgttaaatttttatatatttttatatatgttataatatgtagataaaaagataattttttatataatttgttgggataaatttaggaggtttatagtatgatttgtttgaaggttttttttgttttagattttgtttagttgttttaggatgaggggatttatattatagtataattgtattttatttatagtataaattattttttttttttttagttgacgagtttagatgggtaataatagtgtttgttaaagagaaaaaaaaatgtatttaaattagataatttattggtataaatatcgagatatagaagtgataatagttttaagttaatgtttgatggtggtagttttagtaagtttttttttgatgtttttgtgtttttgtatatgttttttttttgttattgttttttttattaaatataatataatggataagtggaattaaatagaattgagtttaaattttttgttatttatcggttttggtattggataaattaatttttttgagtttgtttttttatttgtaacgtagattagttaatattatttattggaaagcgttgttttttagttaatgtatgtaaggtttaaaatttagatgacgggttgataggtgtagtaaatttttatggtatacgtatgtttatgtaataaatttatacgttttgtatttgtatttcggaatttaaagtaaaaaaaaaaaaaaaaaaaaaaagaaagaaagaaaaagaaaaaaaaggttgtttttggggattaaataagataattatgtaaggtggttagtatagtttttggtatatagtaaatgttaggtttgtttgatagatttttatttagtagttattgtttttttgaaaattttttttagacgtttttacggtgtttttcgtttttatattattataattttttattatattattattcgtttattttttatagttttttttttttttttttttaattagtgattttaaaaggttagtaagtgtttaatattttttattttttaagtgattggtaaagtttcgtatttattagcgttttaagtttgtttttgttttggtcgattttgtaaaacggattgggcgggatgagaggtggggggcgtcgttaaggagggagagtggcgttttcgtcgagggtgtattagttagatattttttgcggggttcgagagttttttttattagatttcgggatagggatgaggtttatagttatttattagattttttgtatagtttcgttaagtgtatttcggtttggagggggtggttttgggtagaagtacgttcgggtcgcgtcggatgttttttggaaggcgtttggatttacgttaggttttttagtttaattttttatgatttagcgttttagttcgcgtatcgattagcgttttagttttttatagacgtcggcgggttcgggagtttcgcggacgtgacgtcgcgggcggaagtgacgttttttcgcggttggacgcggcgtttagttgtcgggcgggggagggcgcgttcggttttttttaggggacgttgaaattatttttgtaacgggagtcgggagaggacggggcgtgtttcgacgtgcgcgcgcgtcgtttttttcggcgtttttttatagttcgttggttttcgtcgcggaaaggcgttatgtcgtttaaaatttttcgaaaaacggtcgttatcgtcgtcgttgtcgtcgcggaattttcggtatcgtcgtcgtcgtttttttttgaggaggatttagagtaggatagcggttcggaggatttgtttttcgttaggtgagcgagtagagtcgtcgtcgttttacgcgggaagggcgtttcgggtgtgcgtagggcgggcgtaaggcggttcggcggggattcgttttcgttaggggtcgggtttcggcgggaggaggcgttttttttgtttttcgttacggcggagcgtttgtagaatggtgataggattttgggtttttgggcgaggggtttcggttttaatttgataggtgtcgggcgggtggggttagggttttgagcgaagtgataggtgtagtttttttttgtgaggttcggaggtagagggtcgttgcgagcgtttattagacgtaaaaaatgaaaaataaaaatataaaaatggtgtttgtgggagagttttttatcggagaattggagtatttcggtggtcgtttgattttttgttttggtttacgcgatgtaatagttgggaagtattttttttcgggcgtgtattgtatttgaagtttatttgtgggagaggtcgattagaaagttttggataagaagcgtagggttttgagtgtttattgtttataggatattcggtttaggagttttgcggcgtttttttagaataataatgtatcgaggttttggggatttaaagttatttgtagtgattgatggagcgtaattttttagaggaattgaaatatgggtaaaatttttatgagatatttattagaagtgtttgaaagtttttaaattttttttttttttgtttgatgaattttttttgcgtgttagtcggtttcggtttgttttattattttttttattttgttttttgattttgaattagtaaggattttggtgttttttttttttgtttttgtttttggtataaaattagtggttttgtgcgtaaatggaaattttcgtttttttttattaagtggaatttaaatttaagtaagtttatacgaatgtattagattttgaagggaagtatttattgtattataatattttattttttttgatttttttattttatggttaaatagttatgattgaaagagtgtaattgttattattgttagtattggttttattttgagataagtttattgtagagggaatgggatttgtttttgttttttattatttttttttttatttttgtttattattaaatttttttatttttatttatttttttttattcggtatatattaataatttacggtagaaaagattgaagtgggatttaggaaatggtttttggaaggttattaaaaatttatatatttaaatggattgttttataggttagttaaaaattatattcgttaaaaaattaaaataataataataaaaaattaaaaattacgtttggggtatgttttgggaaaagatatggttttagtttttgattaaattttgatgtatttaatttttgtaaattttttttgggaaaatgtagtaatggttattttaaagaattttatgttatgtatatagttttggaagtatattttaatgtagggtaattaggaatattgacgttgtggttattgtttggaaaaaagaggattgttttttttattttttaatttattttatatattttaagtaatggaattataaaaaatttttttataagttaaaattatataagatatagtttgtttttgattatttatatttataaagggttttattaatatagatagttgaattttataaattaattagtaagggtagaattattgtcgtgtagtttgatattgagtattttgtttggagatggaattaaggtttagtttaattgtatttttagtgatagattttatttttgatttgagagtttagattttatttttgttgttttatttttggtttaagtaatgtagttggaagggaaattgttattaggaatagtatattatatttattgttgaaataattaaaggttaattatgtttcgagttgggtgtgatggcgcgtatttgtagtttatgttatttaggaggttgaggtaggaggattatatgagtttgggagttggaggttagtttgggtaataacgtaagattttagtttttaaaaaaataaaaaagttgattaggtatgttggtttacgttgtaatgttagtattttgggaggttaagatgggaagattgtttgaggttaggagtttgagaggagtttgggtaataaaataagattttgtttttaaaataaattttaaaaaattagttagtggttgtggtatatttgtaggtttatttatttaggaggttgaggtgggaggatttttgagtttaggagtttgagattgtagtgagttatgattttattattgtattttagtttggatgatagagtgaaattttattttaaaataagaaaaaaaaataaaaattaattatgttttgaaggaggaattggtagtttagaatagtggttaagggtatggattatagagttagattgttgggtttatatagtggtttattttttatcggttgagattttaggtaagttttttaatttttttaatttgatagatatttgtaaatgtttatttttatagatgagaatatttatttaaaagggttgatgtcgggatttagtgaaattatatgtttaaggtattttttataggattatagtaaatatttaaaaattattaattattttttatattatttttattagtagataatatatagaaattagatgaatgaaaatgaattagttaataagaatttattaaatgtttgtttttgttaaggggaaaggataaaaataagtagtcgtattatgtaagatgtgttagtaggtagagagatatatgaaatattgataagagaagattatagtttaataaagttattggcgttgaattgtataatattatttatgggtttttatttttttgttgttatttttattttatttttttaaatagttttagttattatatttatttttttttatagaagtgttttgttgttttgaagtatatttgatttattatgtaagtaaatattttttattgtgtggtatttttattttggaatgattatgaaaaagataattatatgtttaaatttgaagtgtaatgtttttttaagataaaataagattttaaagtatttaataatgtttttttttatagtagtgttatgtgtaaattattgaaataagtatgtattgaattaatttgatttataagtatatgttaattatatgattatttttatttggtagg

SEQ ID NO: 87 - DNA, 8404 bp, Artificial Sequence
  chemically treated genomic DNA (Homo sapiens)
tttattaaatgaaaataattatataattggtatatatttataaattaaattgatttagtatatatttgttttaatagtttgtatataatattattgtgaaaaagaatattattaaatattttaagattttattttattttagaaaaatattatattttaaatttaaatatatgattattttttttatggttattttaaaataaggatattatatagtgaaaaatatttgtttgtatggtaagttaaatatattttaaagtagtaaaatatttttgtgaaggaaagtaaatgtaatagttaaagttgtttgggaaaataggataaagataataataaaaagataaaaatttatagataatattatataatttaacgttagtgattttgttaaattgtagtttttttttattaatgttttatatatttttttatttattagtatattttatatgatgcgattgtttatttttgttttttttttttaataaagataagtatttaataaatttttgttggttaatttatttttatttatttaatttttatgtgttatttattaataagaatagtatgaagaataattaataatttttgagtatttattatgattttgtagaaagtattttaaatatatggttttattgaatttcgatattagtttttttagataagtatttttatttgtaaaagtagatatttatagatgtttgttaaattggagaagttaaagaatttatttgaggttttagtcggtaagaggtaaattattatgtgagtttaatagtttaattttataatttatgtttttgattattattttagattgttaattttttttttaaaatataattagtttttgttttttttttttgttttgaaatagggttttattttgttatttaggttggggtgtagtggtgaaattatggtttattgtagttttaaatttttgggtttaaggatttttttattttagttttttgagtagatgagtttataggtgtgttatagttattggttaattttttaaaatttgttttagagatagggttttgttttgttgtttaggttttttttaaatttttggttttaagtaatttttttattttggttttttaaagtgttggtattatagcgtgagttaatatgtttggttagtttttttgtttttttaaagattggggttttgcgttgttgtttaggttggtttttaatttttaagtttatgtgatttttttgttttagttttttgagtagtatggattataggtacgcgttattatatttagttcgaaatatgattaatttttgattattttaataatgaatgtggtatgttgtttttagtgatagttttttttttagttatattatttaggttagagataaggtaatagaaataagatttaaatttttaaattaggaatggaatttgttattggaggtgtagttggattgagttttgattttatttttaggtaagatgtttagtattagattgtacggtagtggttttatttttgttggttaatttatagagtttaattgtttatgttaatgaaattttttgtgggtatggataattaagaatagattgtattttgtatggttttgatttataagagaattttttatagttttattatttaaaatatataaaatgagttaaaaaatgaaagaaatagtttttttttttttaagtagtggttataacgttaatatttttggttattttatattagagtatgtttttaaagttgtgtgtataatatggaattttttagagtagttattattgtatttttttaagggaaatttgtaagaattggatatattagaatttaattagaaattaaagttatgtttttttttagaatatgttttagacgtggtttttaattttttgttgttgttattttggttttttaacgaatatggtttttaattgatttataagatagtttatttaaatatataaatttttaatagttttttaggggttattttttaaattttattttaattttttttgtcgtgaattgttagtgtatatcgagtggaaagaaatgggtgagggtgaaaggatttggtgatagataagaatgggagagaaaatagtgaaaaatagaaataagttttattttttttgtaatgaatttgttttaaagtagaattagtgttgataataatgataattatatttttttaattatagttatttaattataaagtagaaaaattaagaaaagtaagatgttgtaatataataaatatttttttttaagatttagtgtattcgtatggatttgtttaaatttagattttatttaataagggaaaacgaaaatttttatttgcgtatagaattattaattttgtgttaaaaataaaggtaaaaagaggggatattaagatttttgttggtttaaagttaaaaggtaaaatggaagaaataatgagataagtcgaagtcgattaatacgtaagaagagtttattaaataggaaaaaaaaaagtttagaaatttttaagtatttttggtaaatgttttatgaaagttttgtttatgttttagtttttttaaagagttacgttttattaattattatagatggttttgagtttttaaggtttcgatgtattattgttttaaggaaacgtcgtaaagtttttgagtcgagtattttgtgggtaatggatatttaggattttgcgttttttgtttaaggttttttggtcggttttttttataaatggattttagatgtagtgtacgttcggaagaaaatattttttaattgttgtatcgcgtgaattaaaatagaaagttagacgattatcggagtattttaatttttcggtgaaaaatttttttatagatattatttttgtatttttattttttattttttgcgtttgatggacgttcgtaacgattttttgttttcgagttttataagagggaattgtatttgttatttcgtttaggattttagttttattcgttcgatatttgttaagttgaagtcgagatttttcgtttaagaatttagaattttgttattattttgtagacgtttcgtcgtggcggggggtagggagggcgttttttttcgtcgggattcggtttttggcgaggacgggttttcgtcgagtcgttttgcgttcgttttacgtatattcggggcgtttttttcgcgtgaggcgacggcggttttgttcgtttatttgacgagaggtaggtttttcgggtcgttgttttgttttgggttttttttaggagggggcggcggcggcggtgtcgggggtttcgcggcggtagcggcggcggtggcggtcgtttttcggggggttttgggcggtatgacgttttttcgcggcgggagttagcgagttgtggaggagcgtcggggaggacgacgcgcgcgtacgtcggggtacgtttcgttttttttcgattttcgttataaaaataattttaacgttttttgagaaaaatcggacgcgttttttttcgttcggtaattgagcgtcgcgtttaatcgcgggaaaacgttattttcgttcgcggcgttacgttcgcgaggttttcgggttcgtcggcgtttgtggggaattggggcgttggtcggtgcgcgggttgggacgttaagttatgaggaattaaattgggaaatttggcgtgggtttaggcgttttttaggaggtattcggcgcggttcggacgtgtttttatttagaattattttttttaggtcggggtgtatttaacggggttatataaagagtttggtgggtgattgtgggttttatttttatttcggggtttgatagggaagattttcgggtttcgtagggaatatttggttagtgtattttcggcgggagcgttattttttttttttggcggcgttttttattttttatttcgtttaattcgttttgtaaagtcggttaaaataaaaataaatttggagcgttgataggtgcggaattttattagttatttagaagatagaaaatgttagatatttgttggttttttgggattattggttagggaaaggaagggagggagttgtggggaatgaacggatagtagtgtaataaaggattgtagtggtgtaagaacgggaagtatcgtggaaacgtttgaggaagatttttaggggagtagtagttgttgaatagaagtttgttaggtaggtttgatatttattatgtattaggaattgtgttggttattttatataattgttttatttaatttttagaaatagttttttttttttttttttttttttttttttttttttttttttttttttattttaagtttcgggatataagtgtagaacgtgtaggtttgttatataggtatacgtatgttatggaggtttgttgtatttattaattcgttatttaggttttaagttttgtatgtattagttaagaaataacgttttttaatgggtagtattagttagtttacgttgtagatgaggaaataggtttagaggagttaatttgtttaatattagggtcgatgggtagtagagaatttgaatttaattttatttgattttatttgtttattatattatgtttgatgaagaaaatagtgatagagaaggagtatgtgtaaaggtataaagatattagaaaagagtttgttgggattattattattaaatattggtttaaagttgttattatttttgtgtttcggtatttgtattaatagattatttagtttgaatatatttttttttttttttggtagatattgttattgtttatttgaattcgttaattgagaaggaaagagatggtttatgttgtgaataaaatatagttgtgttgtgatgtaaatttttttattttggagtagttgagtaaggtttaaggtaggaagaatttttaagtaggttatgttgtaagttttttgagtttattttagtaagttgtataagggattatttttttatttgtatattatgatatatgtgaggatgtgtaaaggtttggtaagtattggtttatttaatagttatttttatttaattttagaaattttttttgtgggtaaatgttaggagatagtttaggtttaggtttagttataaagaatgaatataattaaagtgttatttttatttattttattttagattagtttaggtaagagtttaggatgtagttttgatatttgaaagataaggagtagtttgttgggagtttgataaattgaaatagggatggtatagttttaaatattattaaataatagtaataatattaagtattattgaggatgtgatatttttgattgttgtagttattgtaacgtgaggtaagttattttatagagaaggtagaaatgttgatattggtgtaggaggaattttaaaagaatttggatttttagtgttataaatgagtttttgatttggttagttttggagttgatttaagttgagttgaggtttttatttgtttgtaatagaaagtattatgattgataatgttttttttgtgtttatttttaggatagagattaaattttgggtattattattgttttagtatttagtatagtgttatatatatagtaaatgtttgtttattaaaagtagggatggtaggaaagtgaaggaaagttttaggaattgaagtaaattttttttatacgtagatattatttgttttatttaaaattagtttattaatatttagattatatttatgtaatttagatttatttattattatattataattatgataaagagattttttaatttataaaagaatatatgttttgattatggattaatttaattatgtttattagtatgtaaaatatatttttttgtagttataaaaaggaatgagattatgttttttgtaggaatatggatggagttagaagtttttatttttagtaaattaacgtaggaatagaaaattaaatattgtatgtttttatttataagtgggagttaaataatgagaatatatggatatgaagaggggaataatatatattgggggattatttgagggtgtagggtgagaggatagaagattaaaaaattatttattaggtattatatttgttatttgggtggtgaaaaaatttgtatatattaaattttagagatatatagtttatttatataataaatttgtatatgtatttttaaatttaaaataatagtttgaaaaaagtgtggtgtatatattataatatatatatataaatagatatatatatatatatatatatatatatatatatatatatatatatatatatattataaaatagatttaggaaggggaataatatatattggggtttgtagcggggaagggtggggagagggagagtattaggagagttaatggatgttgggtttaatattatggtgatgggttgatttgtgtagtatattattatagtatatatttatttgtgtaataaatttgtatattttatatatatatttgggagtttaaaagttgaaggaaaaaataataaaatatatttttatttatataatttagaagtaattgagtttattattaaaatttttagttttttgttgtattattaaagaagtattagaatttcggtagagtttagattaggtacggtggtttacgtttgtaattttagtagtttgggaggttaaggcgggtggattatttgaggttaggagtttgagattaggttggtaaatatggtgaaattatatttttattaaaaatacgaaattagttgagtgtggtggtaggtgtttgtaattttagttattttggaggttgaggtaggagaattatttgaatttaggaggtagaggttgtagtgagttgagattatgttattgtattttagtttatgcgataagagtaagattttattttaaaaaatatatatatatatatatatatatatatatatattgaatatgtttatttagtttgaatggtgtaaaattgatttgaagttttgattatttttgttaattattttgttttattgatttgttaaatattgatagcggggtgttaaagttttttattattattgcgtgggagtttaagtttttttttttttttttaaggattcgttttatgaatttggtagtttttgtattgggtgtatatatatttaggataggtagttttttatgttgtattgatttttatattattatgtaatgttttttttgtttttttttgatttacgttggtttaaagtttgttttattagagattaggattgtattttttgtttttttttttttttgttttttattgttgtggtaaatttttttttatttttttatttagagtacgtgtttttgtatgtgagatgagtttgttgaatatagtatattgatgggttttgattttttatttaatttgttagtttgtgttttttaattgtggtatttagttcgtttatttttaaggttaatattgttatatgtgaatttgattttgttattatgatgttagttagttagtttgtttattagttgatgtttattagtttttttatagtgttaatggtttttataatttggtatgtttttgtagtggttgggattaattttttttttttatatttagtgttttttttaggagtttttgtaatgtaggtttggtggtgataaaattttttaatatttgtttatttgtgaaggattttatttattatttatttataaagtttagtttggttggatataaaattttgggttgaaaatttttttttttaagaatgttgaatattggtttttattttttatggtttgtagggtttttgtagagagatttattattagtttgatgggtttttttttgtaggtaattcgattttttttttggttgtttttaatatttttggttttattttaattttggtgaatttgacgattatgtgttttggggttgttttttttgaggagtatttttgtggtgttttttgtattttttgaattggaatgttggtttgtcgtgttaggttggggaaatttttttggataatattttgaagagtgttttttaatttggtttaattttttttgttatttttaggtatagggataattaaatataggtttggtttttttatatagttttttattttttggaggttttgttcgtttttttttatttttttttttttaattttgtttttatattttattttataaaggtgatttttaatttttgatatttttttttttgttttggttgttgatatttgtgtatgttttacgaagtttttgtgttgtgttttttagttttattaggttatttatgtttttttttaaattgtttattttaggtagtaatttttttaatttttttttaaggtttttagtttttt

SEQ ID NO: 88 - DNA, 5312 bp, Artificial Sequence
  chemically treated genomic DNA (Homo sapiens)
gtcggtttcgggggtcgacgatttttcgggtaggcgacgtgttttgtttaggttttatttttcgcgttcgtaaaacggggtggataacgtagtttaaggtagagtcgcgttaaggtttttcgttgtcgtcgggttttggcggtttgatcgggtttggggttcgagcgtgttttcgggtttgggggggtcgtcgcgatggattcgttggtagcgttttaggatcgtttggtggagtagttgttgtcgtcgcggatttaggtttagaggcggtttaaggtgcgtgtgtggagagggcggaacgtgggtttgtgatttcgcgggtttcgggattcggtatggggttttcgttttcgcgcgttacggttcgttagcgtttaggtttagttttttttttcgtagcggtttcgtaggttcgcggttttacggtggggcgacgtgttttgtttaggttttattttacgcgattttaaaacgcggcggagaatgcggtcgtgggatttttttaggggttttaagggtttgcgggggttgggcgtttgggcgcgcgggcgggggaggttcggcgtcgcggtttataaataggcgttgtttcgttatcgtcgttgtcgtcgttttcgcggttggattcgggttaggtggggtttttcgttttttggtatttttcggaggggtgagtgtcgaggtttttagttttttcggtttatggagggttttgagtgtgttttaggggttttaattttgttgttttttgttcgaggagggaggatatcgtttgtgtttgttgcggtttgatatttttttacggaataaatatagtgtcggtttttgtagagttttttttgggattggggttaggggtgtttttttttgttattatttcgtttgtttttttatttttaggtttttgtttacgggttttttttttatttttgttaacgaaatgttttattttgggaatcgtattttttgttgtttttttatatcgtatttggtaagagatagggtattgggtttttggagaaatttttgtgtttttattttgttttattttgtttttaggatattgataagtagtacgtgggtttcgttatattgtttaattaggtgtatcgtaagtcggtgaagaaaggttttgattttatatttatggtggttggtgagtgggttaggtttttcgggggagtggttggggttattggttagttaagttttgtcgttggagttttagatttaacgtagttttttttttgtatttgtgtgtaggtgagttaggtttggggaagtttatattggtttatagtttttttttgatagatttgtataaggatcggaagttgtttagtgttgagggtgagtggtttttaggaggttttggtattgatttttagtttttttttatgggatttttttaaggatttttttttaggtttagtttttattgttttgttttcgcggtgtgggttttttgggggtagggttaaggtattaagatggatgaggacgagggttttggttgttaagggtgaggggttgagggttggagaggtttttttagtggtttttttttcgtagagcgtattagttagacggtagagattttaaaatatacggtggatattgaggagaagggagttaagttgaagtttattatcgtggatacgtcgggattcggggacgttgttaataatatcgagtggtgagtgaggtttgttgagaaaggttttgtttaggcggttatagtattcgaggtttggttttattttttttttgtttatagttggaagtttattatcgattatgtggattagtagtttgagtagtattttcgtgatgagagcggttttaatcgaaagaatatttaagataatcgagtgtattgttgtttatattttattttttttttcgggtatgggtgtgtggttgttttggggttaggttcgggagtgtagtttttataatatggttttttggttgtgtttatgtttatttttggttgttttcggtaggttgcggttagtggatgtgggttttatgaaggtattgtatgagaaggttaatatcgtgttttttatcgttaaagttgattgttttgtttttagtgagattcggaagttgaaggagcgggtgagtttgtcgtcgtataggggtttggttagggttttggggttgagagtattagggggatttgtttggttttaaatttgatggtttttgttttattatagattcgggaggagattgataagtttgggatttatgtatattagttttttgagtgtgattcggacgaggatgaggattttaagtagtaggatcgggaattgaaggtgaatatgtagattggtggggtaggggggatggagttggtgaggggtagaattagagggttttgttttttttatattgagtttgttggaggagggttaggttagtttagttgggtgtaagagttatttgttttaggagtagaggatttgtattttttttatttagggttagaaggtaaaggttattatgtttttgtttggttggggtgggttatgtgggtttcgtgtggtgtttggtaggtatggagtatttgtttagatttagaggtgtagtagtgggttaggtttttaattttaattttttttttatgggttattagaggaaggggttgttttagtggtatattttggtttttagatttttgagttttagggttggtggttttgggtgtttcggtagttagagtgatgatggagattatgttaggggtaggtggttattagggtaggggtattagtatggggagatataggtttagttttggggagggaaggggtagttggagggggtggtttttgatgagggaggagatgaggagggagtatgtttggttgggtatagtttggaaaggttttggaatgtgagttatatgggttttggttttagttaggggtagagaggttagaaaggggtaacgttaggatttttttgaggagagatagttgatggtgatgttggaggggtgtttcgggagttatatgttcgttttttattagtaatcgtgtaattacgtttatcgggtgtgagttttttttttttttttttttaggagagcgcgtttttcgtcgttataggtagtaatacggtggtggaggttaaggggtagcgggttcggggtcgattgtatttttgggggatcgtggagggtgagtagagttttggggtattaggtttggtgggggaaggttgttttgggtcggcgttagtttattatttatttttatttcgtagtggagaattaggcgtattgcgatttcgtgaagttgcgtaatatgtttattcgtacgtatatgtacgattttaaggacgtgacgtgcgacgtgtattacgagaattatcgcgcgtattgtatttagtagatgattaggtgcgcgttttagtcgcgagttagatttcgtttttttggtttcgtttacgtttttataattgagggtcggttttgttagtttatttagatttgaattttgtattattttttaagtttttttttttttttagagtttggtttttttagaattaagtttagggttgtgagggtttcggagggtagggttttagtagtggcggggatgggttaggtatcgttagtttacgttgagtttttcggtggcgtcgtttcgtttattttttttttcgtttcgcgtagtaaattgatttaggatagtcgtatggagagttttatttcgattttgtcgttgtttatttcggacgtcgagattgagaagtttattaggatgaaggatgaggaagtatgtggggcggcgggggcggcggaggcgggcgttagggatgttttttcgcggtgttgtttattcgtcgggttgttttcgttcgtagttgaggcgtatgtaggagatgttgtagaggatgaagtagtagatgtaggattagtgacgttcgtcgcggatatatcgttcgttttcgggacgttttcgtatttttggatattagatcggattgttttcgattcggagacgcggggttatagtttttagttgattttaatttatttttagtattatttttttttaggttattgtgtttgttttcgaggggtttggatcgtagttttcgtttagttggttttttttgattttgggggattaggagcgaagttgggcgggattttagagattcgttttttttgtttttttttcgttttcggacggttatagtatttaaatcgtaggttttgttttggtaggtaggtaaagttaggtagaagaggatttttaggattttgggtttgttttttgttttagtgttgtagaacggatttgggagtttttttttgtttgttttcgcgggttatttagcgagtgttgagattttattttttgtcgaggcgggtcgagtttttttttatttttagacgtttagcgggtagggttgggttgaattaaatgggagttttttagatataaggaggttagaggttgtaaggagcggggtcgtgatcgtttatattttttttttatagttcggttcgatttggagggttttcggggtattgggcggtgagttattttttggtaattttcggtgtcgttttttgttttcgttcgaggttttttttttttagtatcgttgtggtgtgtcgggattttgagtttaggtttttcgatgtttttattcgtatgattttttttcgttatacgatgtttcgttttttttcgttgtgaatgtcgcgttttgttttggtgataggagaataatgttggtgaacgtcgtagcgggtgttcgagtgtttcgtgtgtttttgagagcgggtgggagcggaagtttgagcggtttgcggttttcggcgatagtgtgttatttgtcgttgtagcgcgcgttcgcgcggtttttgggttatttttggttaggtcgtagtattgtggtcggtgcgggcgtggtaggggcggggcggttttatcgttcggttttttcgtttacgtttttcgttgtagagtaagtcgggttgtcgttttttcgttatgggtttcggtgagtttggagttcggtcgggttttcggttgttttttaggtcgattcgggttgagaggagttttggtcgtttggttgtagttgggagagatttgggttagatttagaggggatttttagtcggcgtgcggggtggttagggtggagaggttggcgggttatcgggacgtcgggtattaggggttggatggagtcgggtcggtagtttgggtatttagagatgtcgtttaggtgttcgtcgatcgttcggtttattgcggcgttttttttgtagg

SEQ ID NO: 89 - DNA, 5312 bp, Artificial Sequence
  chemically treated genomic DNA (Homo sapiens)
tttgtaagggaagcgtcgtagtaagtcgagcggtcggcgggtatttgggcgatatttttgagtatttagattgtcggttcggttttatttagtttttgatgttcggcgtttcggtagttcgttagtttttttattttgattatttcgtacgtcggttggaagttttttttaagtttgatttaagttttttttagttgtagttaaacgattagagttttttttaattcgggtcggtttagggagtagtcgggggttcgatcggattttagatttatcggagtttatggcgagaagacggtagttcggtttattttgtagcgggaggcgtaggcgggagagtcgagcgataaggtcgtttcgtttttgttacgttcgtatcgattatagtgttgcggtttggttagaaatagtttagaggtcgcgcggacgcgcgttgtagcggtagatagtatattatcgtcggaggtcgtaggtcgtttaggttttcgtttttattcgtttttaggggtatacggagtattcggatattcgttgcgacgtttattaatattgtttttttgttattaggataggacgcggtatttataacggaagaaaacggagtatcgtgtggcgggaagggattatgcgggtgggaatatcgggaggtttaggtttaggatttcggtatattatagcggtgttggggagaagaggtttcgagcgagggtaggggacggtatcgagagttgttaggaggtggtttatcgtttagtgtttcgggggttttttaggtcgggtcgggttgtggagaaggggtgtaagcggttacgatttcgttttttgtagtttttggtttttttatgtttggagggtttttatttgatttagtttaattttgttcgttaggcgtttggggataagggaagattcggttcgtttcgatagaaaatggggttttagtattcgttgggtgattcgcgggagtaggtaaaggagggtttttaagttcgttttgtagtattggggtagggaatagatttaggattttgggaatttttttttgtttagttttgtttgtttgttagagtagggtttgcggtttgggtgttgtgatcgttcgggggcgggggaagggtaagggaggcggatttttgaagtttcgtttaatttcgtttttgattttttaaggttagagagggttagttgggcgggggttacggtttaggtttttcggaaatagatataatgatttgggagggggtggtgttgagaataaattagggttagttgggggttgtggtttcgcgttttcgggtcgggaatagttcggtttggtgtttaggggtgcgagggcgtttcggagacggacggtgtgttcgcggcgagcgttattggttttgtatttgttgttttattttttgtagtattttttgtatgcgttttagttgcgggcggagataattcggcgggtgagtagtatcgcggaggagtatttttgacgttcgttttcgtcgttttcgtcgttttatatatttttttattttttattttgataagttttttagtttcggcgttcggggtgggtagcggtaggatcgggatggggttttttatgcggttgttttgggttagtttgttgcgcggggcgggggggaggatgggcggggcggcgttatcgggaggtttagcgtgggttggcgatgtttggtttattttcgttattgttgaggttttgtttttcggagtttttatagttttggatttggttttagggagattaggttttgggggagggggggggtttagggaatggtgtaaagtttaagtttgggtgggttgataggatcggtttttagttatggagacgtgggcggggttagaggggcgaggtttggttcgcggttggggcgcgtatttggttatttgttggatgtagtgcgcgcggtagttttcgtagtgtacgtcgtacgttacgtttttgaggtcgtgtatatgcgtgcggatgagtatgttgcgtagttttacgaagtcgtaatgcgtttggttttttattgcggggtgggggtgggtagtgggttggcgtcggtttaggatagtttttttttattagatttggtattttaagattttatttattttttacgattttttaggggtatagtcggtttcggattcgttgttttttggtttttattatcgtgttgttgtttataacggcgaagggcgcgtttttttgggggaaggagggagaaaggtttatattcggtgagcgtaattgtacggttattgatgggaaacgggtatgtaattttcggggtatttttttagtattattattaattatttttttttaaagagattttggcgttgtttttttttggtttttttgtttttggttggagttagagtttatgtggtttatattttagggtttttttaggttatgtttaattaggtatgttttttttttatttttttttttattaagaattattttttttagttgttttttttttttttagggttgagtttatgtttttttatgttgatgtttttgttttggtggttatttgtttttggtatggtttttattattattttagttgtcggggtatttaaagttattaattttggagtttagaaatttgggagttagggtgtgttattggggtagtttttttttttggtgatttatgggaagagggttggggttgggggtttggtttattgttgtatttttggatttgggtaagtgttttatatttgttaagtattatacggggtttatatgatttattttagttaggtaaagatatggtgatttttattttttagttttggatgaagggggtataggttttttatttttagaataaatgatttttgtatttaattgggttgatttggtttttttttagtaggtttaatgtgaaggagataaagttttttggttttgttttttattagttttattttttttgttttattagtttgtatgtttatttttagttttcggttttgttgtttgaagtttttattttcgttcgagttatatttagggaattggtatatatggattttaaatttgttaattttttttcggatttgtggtggggtaaggattattagatttgaggttagataagtttttttggtatttttagttttagggttttggttaggtttttgtgcgacggtaggtttattcgtttttttagttttcggattttattggggataagatagttagttttggcgatgagaggtacgatgttgatttttttatgtaatgtttttatgaaatttatatttattggtcgtagtttgtcgagagtagttaagggtgggtataggtatagttagggggttatattgtaggggttgtattttcgagtttggttttaggatagttatatatttatgttcgaagggggagatgaagtataggtagtagtgtattcggttgttttggatgttttttcggttgaggtcgtttttattacggaagtattgtttaaattgttggtttatatagtcggtgatgggtttttagttgtgggtaggagggaggtgaggttaggtttcgagtgttgtggtcgtttaggtaaggttttttttagtaggttttatttattattcggtgttgttgatagcgttttcgaatttcggcgtgtttacgatggtgagttttagtttgatttttttttttttaatgtttatcgtgtgttttagaatttttatcgtttggttgatgcgttttacggggaaggggttattggaagggtttttttaatttttagttttttatttttggtagttaggattttcgtttttatttattttggtgttttggttttatttttaggggatttatatcgcgagaatagaatagtgggagttggatttgaaagggagtttttggagaggttttatggaaggggattggggattagtgttagggttttttgggggttatttatttttagtattgagtagttttcggtttttgtataagtttgttaggaagaggttgtggattagtgtggatttttttaggtttgatttatttgtatataggtatagagaaggagttgcgttaggtttggggttttaacgatagagtttggttggttagtgattttagttattttttcgaggagtttggtttatttattagttattatgagtgtgaagttaaagtttttttttatcgatttgcggtgtatttggttgggtagtgtggcgaagtttacgtattgtttgttaatgttttggggataggatggaatagggtagggatataaaggtttttttagaagtttaatattttgttttttattaaatgcggtatgaggagatagtagagggtacggtttttagggtggggtatttcgttggtaaaaataaggggagggttcgtgggtaaaagtttggagataagaaggtaggcgaggtggtggtaggagaaggtatttttggttttaattttagggagggttttgtagggatcgatattgtatttatttcgtggggagatgttaggtcgtagtaggtataggcgatgtttttttttttcgggtagagggtagtaggattgggatttttgggatatatttaaggttttttataagtcggagaagttgggggtttcgatatttattttttcggagagtgttagggggcgggaggttttatttggttcggatttagtcgcgggggcggcggtagcggcggtggcggagtagcgtttatttatagatcgcggcgtcgagtttttttcgttcgcgcgtttaggcgtttagttttcgtagatttttggggtttttggaggggttttacggtcgtatttttcgtcgcgttttggagtcgcgtgaggtgaggtttggatagggtacgtcgttttatcgtggggtcgcggatttgcgaggtcgttgcggagggaagggttgagtttaggcgttggcgggtcgtggcgcgcggggacggggattttatgtcgagtttcggagttcgcggggttatagatttacgtttcgttttttttatatacgtattttgagtcgtttttgggtttgggttcgcggcgatagtagttgttttattaggcggttttggggcgttgttagcgagtttatcgcggcgatttttttaggttcgggggtacgttcggattttaggttcggttaggtcgttagagttcggcgatagcgagggattttggcgcggttttgttttaggttgcgttgtttatttcgttttgcggacgcgggaagtgaggtttggatagggtacgtcgtttattcgggggatcgtcgattttcgaggtcgat

SEQ ID NO: 90 - DNA, 3025 bp, Artificial Sequence
  chemically treated genomic DNA (Homo sapiens)
tttttacgatttgatttttatagtcgttttatttatgggttttttataaattaggggtatagaggagtattgaaagttagtttagaggtgagcgcgcgtagttagcgtttttcgcggatatagtagtcgggtgttggagaggtttggaaagggcgtgtcggagagttaagtgttagtcgtttagggtttgtcggtcgttttttttttttttgttcggtaggggatttagcgcgtacgttagtgtggaggggcgggttggttggttagtttcgggtttttcggttatttcggggattttttttaagtttcgttttcgagtgtttttattggtttcggatttttttttttttagttgttcgtttgggtttcggggcgtttaggttattacggataaatagtttagggcgtttggtcgagaagttaggggtgaggaagttttggggcgttgtcgtcgttttttttaattataaattaggtcggataggagagggaggggtgggggatagtgggtggggatttagattgttagtattttgttatttatagtcggggttttcgagcggtagaaagtttcggttattttttgtcgtttgggttgggcgaaagttaggatcgtgtcgcgttatcgttaggatatggagttattgtcgttatcgtttcgcgacgtagatttgacggttttcgacggttttttttgtttttttgttataacggacgatttttatgacgattcgtgtttcgatttttcggatttgcgttttttcgaagatttggattcgcgtttgatgtacgtgggcgcgtttttgaaattcgaagagtattcgtattttttcgcggcggtgtattcggtttcgggcgtacgtgaggacgagtatgtgcgcgcgtttagcgggtattattaggcgggtcgttgtttattgtgggtttgtaaggcgtgtaagcgtaagattattaacgtcgatcgtcgtaaggtcgttattatgcgcgagcggcgtcgtttgagtaaagtaaatgaggtttttgagatatttaagcgttgtacgtcgagtaatttaaattagcggttgtttaaggtggagattttgcgtaacgttattcgttatatcgagggtttgtaggttttgttgcgcgattaggacgtcgcgttttttggcgtcgtagtcgttttttatgcgtcgggttcgttgttttcgggtcgcggcggcgagtattatagcggcgatttcgacgcgtttagttcgcgttttaattgtttcgacggtatggtaaggtcgggattttaggaagtgaggaagttagggcggcgttcgggatattagggacgcgttttcgagggcggggagttggttttgcgggaggtttgggttaggatttttttcgagagagaggatttttttgttttgggtagttgttattggggtagtttgttttggaagtgtgcgggtaagcgttcgagttgttttattgggggcgttattagaatattgtagcgcgaacgtgaagatttttttttttatttatttttatttttaaaatgtaaatttgcgttttttggtgattgttcgtttttggtttggttttgtatgttgtagattttattttttatttattcgtaattatttttttaattaggataggtttgggttcggaattagagttttaggttagagttagggagggggcggttataggaattggtgttcgggtttcgagtcgtttcgcgggtttgatttagtcgtttttgttgtttgtagatggattatagcggtttttcgagcggcgttcggcggcggaattgttacgaaggcgtttattataacgaggcgtttagcggtgggtatttcgggtttttttttgttcgtttttttttttttatggagttgttttggtttttatttaggacgtttttatttttatttatatacgtttatgttttgggaagtggtgtaggagatgaaatattaagtaagtagttttttgttttttcgattgtttcggattttaattaaagtttttagtttttaatttgttttaaagtattgggttcgggggtgggaggtttgtcgcggttttatttttgtttattaatcgagtttttttcgcgtagaatttaggttcgggaagagtgcggcggtgtcgagtttagattgtttgtttagtatcgtggagcgtatttttatcgagagttttgcggcgttcgtttttttgttggcggacgtgttttttgagtcgttttcgcgtaggtaagaggttgtcgtttttagcgagggagagagtagcggcgattttatttagttatcggacgtcgtttcgtagtgttttgcgggtgcgaattttaattcgatatattaggtgttttgaggggatggtggtcgtttattcgttcgagggatggtgtttttagggtttttcgcgtttaaaagattgaatttaaatgttttttttttaatagcgttttaaaagcgattttttttgaggtaggagaggcgggagaattgaagttttcgttttcgttttatagggtaaggatatagcgcggttttttttacgtagtatttttttcggagatttattgcgatggtcgtttcgtgtttttcggtgggttagagttgaattttgaggggttaggtttagttttttcgcgtttttttttatgggggtgagattttcgtagatttaattttgtttcgggatgtatcggttatttgggggggcgtgagatttagtgtatttcggttttaaatgtagtaggtgtaatcgtaatttatttttaattcgtttttcggtttaggattattttttgtaatatttttgtaatttatttttgtaaataagagttgttttgttagagtaggagtttttggggttgtatttatttttgaggtatggtgtgtggtgttatagggaatttgtacgtttatatcgtaggcgggcgagtcgcgggcgttcgtttaggtgattaaaataaaggcgttaatttatatcgtcgtggtttcggttttttttggatatgggtgtgggattt

SEQ ID NO: 91 - DNA, 3025 bp, Artificial Sequence
  chemically treated genomic DNA (Homo sapiens)
ggattttatatttatgtttagggaaagtcggagttacggcggtataaattagcgtttttattttgattatttgagcgagcgttcgcggttcgttcgtttgcggtataaacgtataaattttttgtagtattatatattatgttttagagataaatatagttttaggggtttttgttttggtaaagtaatttttatttataggaatagattataaaagtattataaaaagtggttttgaatcgggaaacgggttgggggtgggttacggttatatttgttatatttgggatcggagtgtattgggttttacgtttttttaaataatcggtgtatttcggggtagggttaggtttgcgagggttttatttttatgggggagggcgcgagaaagttgaatttagttttttaaggtttagttttggtttatcgaggaatacggagcggttatcgtaatgggttttcgagaagggtgttgcgtggaaaaaatcgcgttgtgtttttgttttgtggggcgggggcggaaattttagttttttcgttttttttattttaagagaagtcgtttttaaagcgttgttgggaggggggtatttaagtttaattttttgggcgcgagggattttaggggtattatttttcgggcgggtgggcggttattatttttttagagtatttggtatatcgggttggggttcgtattcgtagggtattgcggggcggcgttcggtgattgggtggggtcgtcgttgttttttttttcgttgggggcggtagttttttgtttgcgcggaggcgatttagaaggtacgttcgttagtaggagggcgggcgtcgtagggttttcggtggagatgcgttttacgatgttggataggtagtttaggttcgatatcgtcgtatttttttcgggtttgggttttgcgcggggagggttcggttagtaagtaggggtggggtcgcgataagttttttattttcgggtttagtattttgagatagattggaaattgaggattttagttagagttcgggataatcgaaaagatagggagttatttgtttagtattttattttttgtattattttttaggatataggcgtgtgtgagtgggggtgggagcgttttagatagaggttaggatagttttatgaaggaggaggagcgagtagggagaggttcggaatatttatcgttgggcgtttcgttgtagtaggcgttttcgtagtagtttcgtcgtcgggcgtcgttcggggggtcgttgtagtttatttgtaaatagtaagggcgattgagttaggttcgcgggacggttcgaggttcgaatattaatttttgtagtcgttttttttttaattttagtttaaggttttagtttcgggtttagatttgttttggttgggggggtaattacgggtgggtaggagatgaggtttgtaatatgtagggttaaattaagggcggatagttattaaggggcgtaaatttatattttggaagtagggataagtagagaaaaagatttttacgttcgcgttgtagtgttttaatagcgtttttaatggggtagttcgaacgtttgttcgtatatttttaaaataggttattttagtgatagttgtttaggataagggggttttttttttcgggaaggattttggtttaaatttttcgtaaggttagtttttcgttttcggaaacgcgtttttgatatttcgagcgtcgttttaatttttttattttttggggtttcggttttattatgtcgtcggagtagttggagcgcgggttggacgcgtcggagtcgtcgttgtagtgttcgtcgtcgcggttcgggggtagcgggttcggcgtatagaaggcggttgcggcgttagggggcgcggcgttttggtcgcgtagtagagtttgtaggttttcgatatagcggatggcgttgcgtaggatttttattttgggtaatcgttggtttggattgttcgacgtgtagcgtttgagtgttttaaaggttttatttattttgtttaggcggcgtcgttcgcgtatggtggcggttttgcggcggtcggcgttggtggttttgcgtttgtacgttttgtaggtttatagtaggtagcggttcgtttggtggtgttcgttgggcgcgcgtatatgttcgtttttacgtgcgttcggggtcgggtgtatcgtcgcggggaagtgcgagtgtttttcgggttttaggagcgcgtttacgtgtattaggcgcgggtttaggttttcgaagaagcgtaggttcggggagtcgaaatacgggtcgttatagaagtcgttcgttgtggtaaaggagtagagagagtcgtcgggggtcgttaggtttacgtcgcggagcggtggcgatagtagttttatattttggcggtggcgcggtacggttttggttttcgtttaatttaagcggtagagagtggtcggaattttttgtcgttcgggagtttcggttgtagatagtaaagtgttggtagtttgaatttttatttattgttttttattttttttttttttgttcggtttgatttgtggttaaggaaagcggcggtagcgttttagggtttttttatttttagtttttcggttaggcgttttgggttatttattcgtagtagtttaaacgtttcggagtttaggcgggtagttgggggagggggagttcgaggttaataggaatattcgggggcggggtttggggggggttttcggggtggtcgaggggttcgagattggttagttagttcgtttttttatattggcgtgcgcgttaggttttttatcgggtagggagggagggagcgatcggtaagttttaggcggttgatatttggtttttcggtacgttttttttaaatttttttaatattcgattgttgtattcgcgggaaacgttggttgcgcgcgtttatttttgagttgatttttaatatttttttgtatttttgatttgtgggggatttatgggtagagcggttgtagaaattaggtcgtgagag

SEQ ID NO: 92 - DNA, 11913 bp, Artificial Sequence
  chemically treated genomic DNA (Homo sapiens)
taaagtagggtgttattaaagaaagaaggaagaaattggttaaacgaatttagaatataaataaaattattgtataaataaaatttttgtttacgattaagttggaatggcggttaaaaaagaaaagggaaaaaaaatttttagatgtaggtagatttttataattaagttattttttaaaggggaagtaaatgtgatagaatatttagtaagtaaatttattgaggaatattttgtttttatataattaaatttaatattgaggtaaaattgataattattaaattgagggtagttgggagagggaaaggggatgagataaaatttagtttataaaatattttattattttttataggttaaaaaatataaaagaaatatttggaaagaattgtttaagacggaaagattttaagattgtgtgattttttttttttttttttttttttttttttttttataggtgtagaataattttttttttttttttcgtggttttttttttttttattttttttttttgttgtttgtaaagttgaatttggggttaggagttttaattgtaattttagattggaattttagatggtgcgtttaggattggaagtaatttttagtttattaattttatgggtttacgtatttgttttggttacggtttggtttttatttttattgtggtattaatgtagaataaattgagatatattttttatataattagttttagaatttaaaaagatttacggtataataatagaggtagtgtcgcggaatttttttattgaggattttcggggagttcggggattatttcgcggtggtattagaatagacgagtaattttagcggttttaggtattgcgaattgggggagagggggaaattttgtatcgtattcggtagtatttaacggtttcgggtttttagatagggttagcgaggagagttaggatagtaagtggggattggttaaaaaaaatcgatttaattttgaaatgattagaagaagttgggagtagttattataaagttttttttttgtttttttttttttttaattgaaggaatgacgttgaaatttttatcgttagcgcggggttgggaattattttaaatatttgttttgtagtttcgagtgggtagatttcgaagagttggagtcggcggggaggggaggaatagttgttgggttgttttgcgcgtggggttcggggcgcgggtttcggggagaggcgttagtcgaaagtttgtttttttttcgcgataggtagtagcgaggtcgagttattttttattacggtttgcgggtttcgcgcgtagtgtggttgttttcgtttttgatcgatcgtagcgttttggggtgtttatttagttgttcgcggtcgttgggtgattttcggagggcggtttaggcgtgcgtattggtttttggggttgcggttgtagtagtttagtttcgcgttttgttagatgtagtggatagcgtcggggtgaaagtaagggttgagaaatttttattgttttgtttttatttagtttcgatttttttatattgtaataattatgtattttcgaggtcgggatgtttgcgttttgttagtgtattaacgttatatggttttttaggggttgttttcgtttttgtattttattagttttgaagaggtagaggggtggtgggtaaaatttttaattggacgttgagagattcgggttttagttcggcgttgttattaatttgttttttgtttttaaatagtagtagtaataaaaattgtaaagttgattgagttaaaggtttatattgtttttttatttaatttttagaataattttatgaggtgggcgttagtattttattatttcgtttgattagtaaggaaattgaggtttagagagattgcggaattcgtttagggttatatagttgttggttatttggtagagttgaggttttattttggggttattaattttttgttttttatcgttgcgttttatagattgtttttttttcggttgtttgggttttagtttttttttttgtaaaacgagaagtttaatttgtagttttttttgttaatcggtggtttagattaggaatttttgttatagatttcggcgttgataggggtaagaaggtgggtgaaagaagggggcgtttagttttttatagtttgtttttttttgggatttcgcgaagggcgggtttcgcgagttaaaggaggtataggagagcgtttatcgttcgcggcgggtgaaggtgttatttgttttcgtgttaggttgtgagttttggtgtttagtttagggcgttaaggttagtgtagttggtatgttttttttggaaaattttaggtttttcgtagagaacgttatttataataaagaagaggatagagaggtatggagcgttttgcgattgtaggagtacgttagttttttagcgttggtttagtgtcgtttgggttttcgggtatgtggattcgttggggtcgtacggagattttttgtcgggtttttggggtttttcgattgcggttttttagtttagtattttttttttggtttcgtaggttgtagggaattttttttatttttttagtcggagaagtttaagtcgggcgagggggtatttcggggttcgtatcggtgtttttttttttttcgtttttataaggattttgagaaaataaatggtagaggagagaggagttttatatttgtttggtttttttttttttttatttatttttatattttttatttcggggtaaaaatttatttttgaaaaatgttggtagagatttacgtgtttttgttttatttgggttttataaatataacgatttatatttaagttagtttttttttagataatttttttttttttcgttaaaagtgttaaggatggtaaaagaagaaataattttaattttttcgtttggaaatgaaagttttcggttttttataaagggtttttcgttttttatagttgagttttagttaagaaaaacgatttttaagtagaaataataggcggggagaaggaagggagatatagggatttggggggtttttagggtaattggtagtgaattttgtttcgagagttttttttttatttaaaaaattaaacgcgcgagtttcgcgaaaggtttagggatagatcgtgtgggagaggattgagtagagagcgtgggggtagtgttttgtagaatttttttttttttaataataattttaaaagtttttgagtggagacgacgtaaagttaagtagtaaaggtggtttgggaggtaagcggagggtttaagtgtcgtatttttatttttagggttttttgcgtttacgggatgcgtatttttaagaagtgcgtttttcgagtaagttttgggttcgtatatatttcgggttcgtagttagaatttaatggcgataacgtttatgtaatgtaagttaaaaattaaagcgtaaaaaattattatgttatttattgaaacgttattttttgttaaattgtaattattttgttttatataagtttggttggaaagtttgtagttttagttcgggttagttaggtataggaggtcggattgtaatcggttgtttttttttcgtcgcgtttggtcgttttacgttgcgtcgtcgttgttgttttttggcgtttttgggattttatacgtatttttgaaatacgtttcgtttcggttttcggtttttttttttgtttaggggttgttttttaatagatattgatttttttagaagatttaaaaattaaattaaaatattttttattcgttttaaatatttgttttggggcgcgggggttgttaaatagagattagacgaagggagttagatttagcgaagtttttcgagtttttaaagattcgaatattaattcgcgttcgtgggtcgatggaggttttttttattttattttttggtttttttaattggttttcgttttttggttaattattgagtaattagaatggtattttcgattagggttataggtagtgttcggcggagtggttttaggagttattcgttttttgtcgggtttcgtatttaaatttttttttttattttttttttttaaattgggcgttaggatgtttcggtcggaatatacgtaggttttgggcgtttgtttaagggttttttttttttttaaattagtcgttgttttttcggtttaatcgtagaagaattagatattttttattggaaagggaaattaagtgttgttgattttaattttaggtaggcggtaatcgtttttcgtttggcgtaaattttattaagtaaataattattagtcgatcgaaatacgttcggtttataattggtgtaattttcggttatttaattgagggacgttcgtttttagtttcgatttttggaatttataaagggttatttttttttttagtgattttaagattatggttatttttttattcgatagttttagaagtaagagttagatttaagggtgtaaagtaagggtatacgtttttttgaagtttgattgagttttttttgcgtttttttgaagttttcgtttttttggagtttatttgtttttttttttaaattatttttttagattaataattttatttttatttttatcgtattcgattttgttcggatttattgtttatttgaacggattttttagtgagacgaggtttttatattggcgaaggttaagaaggggaggtggggggagggttgtgttatatcggttagttgagagcgcgtgttgggttgaagaggagggtgttttcgagagggacgttttttcggattcgtttttattttagttgcgagggcgtttttaaggagtagcgcgcgttgtttggtcgggtttgggttgttgagtgaatggagcggtcgagttttttggttttttttttttttcgcgtcgtcggttttttttatttgagttttgggaagttgagggtagttaggtagttggggtaaggagtttaaggtagcgtttatattcgggggtttttcgtaattcgatcgtttgttcgtttttttatttttcgtttttttttttatttatttatttatttatttatttatttagagtcgggacggtagtttaggcgttcgggtttcgtcgttttttcgtcgcgattttggatttttttttgttgtaggattcggtttttacgtgtgtttcggagtcggcgttttagtatacgtttcgtttcgggtttgggtgtttatagtagttagagtagtagggagttcgggattcgggcggtatttgggttaagttaggcgtcgtcgaggttagcgttgaacgtttttagggtcggaggagtcgcggggcgttcgggtttgagtcgtagtaaatgggtttcgacgtgcgggatttgaacgcgttgttgttcgtcgttttttttttgggtggcggcggcggttgtgttttgtttgtgagcggcgcggcgtagtgggcgtcggtgttggattttgcgttttcgggcgtttcggtttacgggtcgttgggcggtttcgcgtcgttatcggtttcgtcgttattttcgtcgtcgtcgttttatttttttattaaataggagtcgagttggggcggcgcggagtcgtacgaggagtagtgtttgagcgtttttattgtttattttttcggttagtttattggtatagtcggagtttgtcgttacgggtttttcggttttttttcgtttagttaggcgttattcggttaggttaggatgttttttaacgcgttttatttgtttagttgtttcgagagttagttcgttattcgtaattagggtaagtaggtcggggagcgttttttacgcgcggggtagtggcgttagggatttttcgttttaggatattttttttttttattttttttgatcgtagtttttatttagttgttttttaagggtcgtgaggatagcggaagcggcggttggggaggaggtcggagagtgggagtgtacgtaggtattggttttcgatattttttaaagttaggtagagttaggagtttgattgttcgtaagagtcgggagggcgtttggggttttttagagttcgagagatttcgggattgttagtttttacgggagtggaattaggagatcggcgtagtgtttggttttgttttggggagagttttgttaattaaggaaacgttaaattgttattaagcgtagcgttttttagacgtttggattttggattcggagtgggattagcgcgggggtgagcgtttgtgttgtgttgttttcgtagcgttaaaatgtttaggagtatttttagtttttataatacggtgttggtatatatttaggtgtatattaagtatcgtagagaattagaatgagtatatgtatttttagtaattaaatggttttttggaatagcgtcgtgttcgtggatagttttcgcgtatggtaatatagaagtggatttttattgggtttcgtttaggcggcggttacgtaggttttggggatggaagagaatttgatttattcgagtttaagttatgcgggattaggttttatcgtaggtagtggaaggaggtacgagttttggttttttttttagcgtatttggggcgtttttttattttgtaaacgcggggtttagttgggatagtatttttttaagatttggggttagaataaggatagggttattcgttgtgtttagttaggatataaggagggaattcggtatacgataagtattaggttggttttttatttcgcgtcgatgttcgtttatttttttttcgtttgggcggcgcggattcgaatttgcggagtttttgtagtttgttttttttatttatttttagtggatttttacgttattgagaatttaagttagttcggtttgattcggtaatttagtaaacgttttattaatataatggcggatgttttttttggagtaaaattattcgagggtttagggatcgggatgtttttggaatgcgtgggaagtagagtgtattttttgtaggaggtattttcgtttaaggttcgggagaagggttttgtttttgttgttcgtttttattcgcgttttttaaacgcgcgtttttaggtcgtttttattttagtttaattaggagtattcggttttcgcgaagttttggagaaatcgaaatcgttttttttttcgggagaatttgggattattgttttgtggaggaatcgtaagtagatttaagggttgtttttattttatgtttttagttagtgaaattagtgttttgtatttaaggggcgttgggataatttattggtcgttgaggtttgtgttttttgattagatcgcgttatttttgtttagtaggttggtgttatttttggggagtttttaggttttagtgttttcgtttataagaggatagttgagatgggtaatttggagattgggttcggtttgaagttatattttatagatgtagaagcgttatttattatttttttggggttttaaatatggaattcggtaatttatttaaatatttgtgattgagaaataatgaattcgagagtattgtttgtatgtgtgttatttggaggcggttgagaaattatcgaatttatgtttttggggtataaaatattattacgttattatttttttagtatttttaggggatttttgaaatttgggttttgtcgtttcgtttgggttttttgtttagttttttttagggtaggtttggtgtttgggattttattatatgtcgtggggggtgggattgtgggttttgtagttagtaggtattatatttttggaaaatatttggatttttttgtaatatataggcgtggttgttatggagaaaaagttaaaaggggattaggattagtaggtgaatgtattttttttttttattttggagaaaaagtttaatggagagagggttttagatttaagttatatagtttggaagtattatttttaggtttaagttttgttttgtagtgaaaatagatgggtttattttatttagtttttgaggtttattgggtagtttggatgtgagaagcgtttcggttgttattttggagtgggtaagggtggttttcgagattttgggtttattttttggatttttagggtttttgttgtttttttaggaatgtagggtttggtttaagatttgggttgtgagaggtaagggtattaatttttaaaaatgtggaaatggttattagagcgttaaggttaaattttaggggagaggaattaaggtcgtttttggatttttagggtagtttagttatggtgtataggtaggggtaattgttggtatttatttataatcgtttaaaattttataagtatgtttatattttaaatttttaaatattatattttgtattttaattttgtaaatattaatttagtaaatattaatcgtttatttggttaggtattgggttttgaatattaattaagataatggtttcgagaatttttgtaagaagtttattagttaattttggagaggttttttgttttggatgaggaaatttaggttttatgagattaggtggtagaggtgggatttgaatttagattatgttagggtgtttttattttttttttagggattttggttttatcgttgagatggattttttttggtttgcgggaggggtattaaatttttagtttatgtgtgggggttgacgggtttgtgagggtagatgtggggtgaggatttgagtagttttagattagatgtaaggtttaaggaggaggggaaaaaagtttgtttgggtcggacgcggtggttcgaggcggttggattatttgaggttaggagtttgagattagtttggttaatacggtgaaattttgtttttattgaaaatataaaaaaaaaaattggtcgggtttggtgacgggcgtttataattttagttattcgggaggttgaggtataagaatcgtttgaattcgggaggttgaggttgaagtgagttgagatcgcgttattgtattgtagtttgggcgatagagcgaaatttcgtttcggaaaaaaaaaaaaaaaaaagaggttgtttgttagtttattgatttcgtagtttcgtaggttcgtagaattttaaggtatgattaggtttgggattattaggttattttagggttaggtgcggaggtttgcgacgttcgagggttaaaggttttttttttcggttatataggagagggtattttgttgggggataggttttttttaattatagtgtagttgtagttatcgtttttagttttttgagtatttttttggttgagtttgttgtttattttattttttagtttttacggttcggttaggttaggcggttttcggtttttttgtagtcgtcggcgggggaggagggtatagagcgcgtttcgttttttagcgtacggttaaggttgcgtttttttttcgggtcgggattaatcgtgggaaaggcgttattttggttattcgattttttttttttaaggtttgtataaggagtttttgaatacgttgttttttttagtcggtagttttattttttttggtttttgttttcgtatttttcgcgttaggttaagcgttgggtttagggatagcgcgttttaattaaattcgtgttcgataagtttttaattaaaagagattttttttcgtttcgtaggcgtttttattattgtttttttcggggggatttgaaggagagggtttgaggtcggtttttgttcgtcgaggtttgcgtgttcggtttgggaggaggtttaggagggttcgcgggttacgggtatttttgggttcgagttttggggtgcggacggacgtttcgagagtgggtgtcgcgattcgggatttacggttttcgtcgggtacggatagttgcggagtagggttttgaggattgtgtagtgttttgggtttttgtttatttttgggtttaggaatggagaagggttcgtttagagaaaattttttcgtagtttttatttcgtttttttttttttttttttttttttttttttttttttttttttttttttttttttttttgtgtttgtttttttttttttttttttttttttagtgtttttttagaaattcggtttttatttcgggtaatagtgggtgttttgagttaaatttcgtttgtaagtttatttataggttttaaagaaggttaggttttaggttttaaaaggaagtttgtggaagtttaaacgtgttcgtttatgtaggagagttaacggggtcgggggttatttttgtttatttagtaggagagaaatggaggttttcgaggttatatgataaaagttagtggttttttaaatttttagtgtgtggtgttgagtagtgtgtgagatttaagtttggatttgtattattcgggagttaggatttgtttttttttttttttttttgtattttgttatattattttttaggtttatgtttttgttgttttagagaagttttttttttttttttttttttttttttttttttgggcggggggtggtggtgtgtgtgtatgagcgttcgtgtgtgtttcgaaaatggaggtaacgatgttttgggttttgtttatcggttgagttttgtttaagtttttggaggtattttggttaaatagtgtaagagtgggagaatgggtgttgtttgatttaatttatttttgagaattttgtgaagtttggagatttagggtagttttgggttaggaggatttgaggttgttggggtggttttgttaggattttataggagtagttttttttagttattgtgtttggattttaggttatagatttcggaatttgtagaggaatgagattttatttttgggtttcggggttaatgacgtatttttagtcgaaggatttttttttttagaggtagtaatagttttttagaagtttgtggggtataagtttaaagtaatttaataataaaaattataaaagattatgttttttaattgaggttttacgtttttttttttattttgggggggggggggaatgttaggatttttttagggggaaattgaggtaaaggatcgaagtattattatggagggaaagggagatatagtgttaggtatattttaaaggaaattggttgtttagtttggggagtgaggaagttggtttttatagtagtggttagggtcggatttttgggcgtaaggtgggttttataggggggaggaggaggagagcgtagggtcgttatttgaaggtttaattggaaggggtttttgtttttttttttattagtttttttttgggtgttatggtgttaggtcgggtagttttagatagataatattattcggtaattattttttttatttttaagattaggttatttaattggtttcgagtaattaatgaaagttggtgcgcgggtttttgatttatagttcggagttaacgcggggttagtttagtagatttatttcgtttgttcgcgttgtttttgcggaagagttgtagtttatttttggggggtgaataattttttttgtcgattaggtaacgagttttatatttaatttgttaggggttcgttgtagaagcggtagagatcgtagaagattgcggtataaataaattgggaaaaagcgaggtgggggttttagttagaaaaggatggagaagtttgttttaaggttatatttagggatttgggtcgtttttttgtcgaaagttttggaggtttgtggggttggattttttttcgttgggggttcgaatgcggggtttagcgtatatttttttcgttcgtggttggtttagatttattgtttcgttttgcgagagtatcgttgatattgtgttttttttcgtcgttttcgtagg

SEQ ID NO: 93 - DNA, 11913 bp, Artificial Sequence
  chemically treated genomic DNA (Homo sapiens)
tttgcgggagcggcggagagaagtatagtgttagcggtgttttcgtaagacggggtagtgggtttgaattagttacgggcggggggggtgtgcgttgaatttcgtattcggatttttagcggaggagaatttagttttataagtttttaggattttcggtaggaagacggtttaagtttttggatgtgattttgggataggtttttttatttttttttgattaaaatttttatttcgtttttttttaatttatttatgtcgtagttttttacggtttttgtcgtttttgtagcgaatttttggtaaattaagtataaaattcgttgtttgatcgatagagaaggttgtttattttttaaaaataaattgtagttttttcgtaggagtagcgcgggtaagcgaaatgaatttgttgggttaatttcgcgttgatttcgagttgtaaattaggggttcgcgtattaatttttattaattattcggagttagttaaatggtttggttttaaaaatgggaagagtaattatcgagtaatgttatttgtttggggttattcgatttgatattatgatatttaagggaaagttggtgagggggaaaataagggttttttttagttgggtttttagatggcgattttgcgttttttttttttttttttttatgggatttattttgcgtttaggggttcgattttgattattgttgtaggagttaatttttttattttttaggttggataattaattttttttagagtgtgtttgatattgtatttttttttttttttatggtagtgtttcggttttttgttttagtttttttttagggaaattttagtatttttttttttttttaaagtgagaaaaagagcgtggagttttagttggaaaatatagttttttataatttttgttattaaattgttttaaatttatattttataagtttttggaaagttgttgttgtttttggggaaaaggatttttcggttaaagatacgttattggtttcggaatttaaggatggggttttatttttttataagtttcggagtttgtggtttgaagtttagatataatggttaaggagagttgtttttatgggattttggtagggttattttagtagttttagatttttttggtttaggattgttttgggtttttaaattttataaaatttttaggagtaaattgggttaaatagtatttatttttttatttttgtattatttgattaaagtgtttttaaagatttaagtaggatttagtcgatgagtaggatttagggtatcgttatttttattttcgaaatatatacggacgtttatgtatatatattattatttttcgtttagaaaaaaaaaaaaagaaaaagaaaaaaaaaaagtttttttggggtaatagaggtatgagtttggagggtggtgtggtagagtgtaagggagggaaggagggggtaaattttaattttcggatagtataggtttaggtttaagttttatatattgtttagtattatatattggggatttgagaagttattagtttttattatatgatttcgagggtttttattttttttttgttaagtgggtaaagataattttcggtttcgttagtttttttgtatgggcgagtacgtttgggtttttatagatttttttttgaaatttgaggtttggttttttttgaggtttatagatgagtttataaacgaaatttggtttagggtatttattattgttcggagtgaaggtcgaatttttgaaaggatattaaaaagagagagagagaaagagagatagatatagagagagagagagagagggagggagagagagagagagagagagagagagagagagagacgaaatagaagttacgaagaagttttttttagacgaatttttttttatttttgagtttaggagtaggtagggatttagggtattgtataatttttagagttttgtttcgtaattgttcgtgttcggcgagggtcgtgggtttcgagtcgcggtatttattttcgagacgttcgttcgtattttagaattcgggtttaaggatgttcgtggttcgcgagtttttttaggtttttttttagatcggatacgtagatttcggcgggtaaagatcggttttaaatttttttttttaggttttttcgggaggggtagtggtgaaagcgtttgcggagcggagggaggttttttttaattagaagtttatcggatacgggtttgattagagcgcgttgtttttgggtttagcgtttggtttggcgcggagagtgcgggggtaggggttaggggaggtaaagttgtcggttggaaggagtagcgtgtttaaaggttttttgtataggttttggagggagagaatcgagtggttaaggtagcgttttttttacggttagtttcggttcgggaggggagcgtaattttgatcgtgcgttaagaggcgagacgcgttttgtgtttttttttttcgtcggcggttgtagagaagtcgggaatcgtttggtttggtcgggtcgtgagagttgaggggtgaaatggatagtaggtttagttaggaaggtgtttagaaggttgaaaacgatgattgtagttgtattgtgattggggaaaatttgttttttaataaaatatttttttttgtgtgatcggaagagggagtttttggttttcgggcgtcgtaggttttcgtatttgattttagggtggtttgatgattttaggtttaattatgttttagggttttgcgagtttgcggggttgcgggattagtggattagtaggtaatttttttttttttttttttttttcgagacggagtttcgttttgtcgtttaggttgtagtgtagtggcgcgattttagtttattttaattttagtttttcgggtttaaacgatttttgtgttttagtttttcgagtagttgggattataggcgttcgttattaagttcggttaatttttttttttgtatttttagtagagatagggttttatcgtgttggttaggttggttttaaatttttgattttaggtgatttaatcgtttcgagttatcgcgttcggtttaagtaagtttttttttttttttttttaagttttgtatttagtttggggttatttaagtttttattttatatttgtttttataaattcgttaatttttatatatggattaagagtttggtgtttttttcgtaggttagaagaaatttattttaacggtggggttaagatttttggaaaaggagtagaaatattttagtatggtttgggtttaaattttatttttgttatttaattttatagaatttggatttttttatttaaaataaggggtttttttaggattagttggtgagttttttgtaaaggttttcgaggttattgttttaattaatatttagaatttagtgtttgattaagtaggcgattgatgtttgttaaattaatgtttataagattaggatgtaagatataatatttaagaatttaaaatatgaatatgtttgtgaagttttgggcggttgtgagtgggtattaataattgtttttgtttgtgtattatggttagattgttttagggatttagagacggttttgattttttttttttggggtttggttttggcgttttgatggttatttttatatttttgagagttgatgtttttgttttttatagtttaagttttgggttaggttttgtatttttggggaagtagtaggaattttggaaatttaaagaataaatttagaatttcgagggttatttttgtttattttaggatagtagtcggagcgttttttatatttaagttgtttaatgagttttaagggttgggtaagatggatttatttgtttttattgtaagataaaatttaaatttggagatggtgtttttaggttatatgatttgaatttagggttttttttttattgggttttttttttagggtggagaagaaggatatatttatttattagttttggtttttttttaattttttttttatggtagttacgtttgtatattatagaagaatttagatattttttagaagtgtaatgtttgttggttgtaaaatttatagttttattttttacgatatgtgataagattttaggtattagatttgttttgaaaagggttggataagggatttaaacgaagcgatagaatttaggttttaaaaattttttagaagtattaaaaagataatggcgtagtagtattttgtgttttaggggtatggattcgatggttttttaatcgtttttaaatagtatatatgtagatagtgttttcggatttattgttttttagttatagatgtttagatgggttgtcgagttttatatttaaagttttaagagggtggtgggtagcgtttttgtatttatggagtataattttaagtcggatttaatttttaggttgtttattttagttgtttttttatagacggggatattgagatttagaaattttttaaaagtaatattagtttgttaaataaaggtggcgcgatttgattaaagaatataagttttagcgattagtaagttgttttaacgttttttgagtataaaatattaattttattaattaaaagtatagagtggaggtaatttttgggtttgtttgcggtttttttataggatagtgattttagattttttcgaagaaaagggcggtttcgatttttttaaggtttcgcgggggtcgggtgtttttggttaggttaaggtaggagcggtttgaagacgcgcgtttagaaggcgcgggtgaaggcgggtaataagggtagagtttttttttcgagttttgggcgaaggtattttttgtaaaagatatattttgttttttacgtattttaaaaatatttcggtttttaggttttcgagtaattttgttttaggaaaagtattcgttattgtattagtaaagcgtttattaaattatcgaattaaatcgaattggtttaggtttttaatagcgtggaaatttattgaaaataaatgaagagggtaaattataggggtttcgtaggttcgggttcgcgtcgtttaggcgaaagagaggtgggcgggtatcggcgcgggatgagaaattaatttgatatttatcgtgtgtcgagttttttttttgtattttgattaagtatagcgaataattttgtttttgttttaattttaggttttgaagaaatattgttttagttgagtttcgcgtttataagatgaagaggcgttttagatgcgttgaaagaaaggttaaagttcgtgtttttttttattgtttgcggtagaatttggtttcgtatagtttggattcggataagttaagtttttttttatttttagaatttgcgtggtcgtcgtttgagcgaagtttagtgaagatttatttttgtattattatacgcgggagttatttacggatacgacgttgttttagaaagttatttagttattggaggtgtatgtgtttattttagttttttacgatatttaatgtgtatttaagtgtgtgttaatatcgtattataagggttggaggtgtttttggatattttagcgttgcggaggtagtatagtataggcgtttattttcgcgttggttttatttcgaatttagagtttagacgtttgaaaagcgttacgtttggtgataatttggcgtttttttaattaataaaattttttttaaggtagagttagatattgcgtcggttttttggttttattttcgtggggattagtagtttcggaatttttcggattttaaggggttttagacgttttttcggtttttgcgaatagttaggtttttagttttgtttggttttggaggatgtcgggggttagtgtttgcgtgtatttttatttttcggttttttttttagtcgtcgttttcgttatttttacggtttttgggaagtagttgggtaagagttgcggttaaaaggggtaggagaggggggtgttttagagcggagagtttttggcgttattgtttcgcgcgtagggggcgtttttcggtttatttattttgattgcgaatagcgggttggttttcgaggtagttgggtaggtagggcgcgttaggaaatattttggtttggtcggatgacgtttggttgggcggaggaggatcgaagggttcgtagcgataggtttcggttgtgttagtgaattggtcggaaaagtggatagtgaaggcgtttaggtattgtttttcgtgcggtttcgcgtcgttttagttcggtttttgtttgatgaaggagtgaggcggcggcggcgggggtggcggcggagtcggtggcggcgcggggtcgtttaacgattcgtaagtcgaagcgttcgggggcgtaaagtttagtatcggcgtttattgcgtcgcgtcgtttataggtagggtatagtcgtcgtcgttatttagggaggggacggcgggtagtagcgcgtttaggtttcgtacgtcggagtttatttgttgcggtttagattcggacgtttcgcggttttttcggttttggagacgtttagcgttggtttcggcggcgtttaatttggtttagatgtcgttcgggtttcggattttttgttgttttggttgttgtaggtatttaggttcggagcggagcgtgtgttgagacgtcggtttcgggatatacgtggaagtcgggttttgtagtaagaggaagtttaggatcgcggcgaggagacggcggggttcgggcgtttgggttgtcgtttcggttttgggtgggtgggtgggtgaatgagtaggtgggagggagggcgggaagtgggggagcggataggcggtcgggttgcggagagttttcgggtgtgggcgttgttttgaattttttattttagttgtttggttgtttttagttttttaaagtttaaataagaggggtcggcggcgcggggaagaggaggagttaggaggttcggtcgttttatttatttagtagtttaagttcggttaggtagcgcgcgttgttttttgggggcgttttcgtagttggggtgagggcgggttcgagggagcgtttttttcggagatatttttttttttaatttaatacgcgtttttagttggtcggtgtggtataattttttttttattttttttttttggttttcgttagtgtgggagtttcgttttattggagagttcgtttaggtaagtagtgagttcgggtagggtcgaatgcggtgggagtagagatggggttgttaatttaaaagagtggtttggagggaggggtaggtaggttttaagagggcgggaattttaggaaagcgtagaaagaatttagttaagttttaaagaagcgtatatttttgttttgtatttttgagtttggtttttgtttttagaattgtcgggtaggggagtggttatgattttggggttattggggaaagaggtggttttttgtgggttttagaggtcgggattgaaagcgaacgttttttagttgggtggtcgggagttgtattagttataagtcgggcgtatttcgatcggttagtagttgtttatttggtgaggtttgcgttaggcggaaggcggttgtcgtttatttaaaattggagttagtagtatttagtttttttttttagtgaggaatatttaatttttttacggttaagtcgggaaaatagcggttagtttaggagggaagaaaatttttgggtaaacgtttaaagtttgcgtatatttcggtcggagtattttggcgtttagtttggggaggaggggtgaaggggagggtttggatacgaagttcggtagggagcgggtaatttttggagttatttcgtcgagtattgtttgtggttttggtcgaggatattattttggttgtttagtgattgattaggaggcggaagttagttaaggggattaaggagtggagtagggagaatttttatcggtttacgggcgcgagttagtgttcgaatttttgggagttcgaagagtttcgttaaatttgatttttttcgtttagtttttgtttggtagttttcgcgttttagagtaggtgtttggggcgggtagggggtgttttggtttggtttttggattttttaaaggagttagtatttattgggaaataatttttaggtaaggagaagaatcgggggtcggagcggagcgtgttttagaggtgcgtataaaattttaggggcgttaggaggtagtagcgacggcgtagcgtgggacggttaggcgcgacgggagggaagtaatcggttgtagttcggttttttgtatttggttggttcgggttggggttgtaagttttttagttaaatttatgtgaagtaaagtagttgtagtttgataaagaatggcgttttaataaatgatatagtaattttttacgttttggtttttagtttgtattgtataaacgttgtcgttattaaattttggttgcggattcgaagtgtgtgcgggtttaggatttattcgaagggcgtattttttgggaatgcgtatttcgtaggcgtaggagattttgagggtaaagatgcggtatttgagtttttcgtttgttttttaggttatttttgttgtttgattttgcgtcgtttttatttagaagtttttaaaattattattaagaaaagaaagattttataagatattgtttttacgttttttgtttagtttttttttatacgatttatttttaaatttttcgcggggttcgcgcgtttggttttttgagtggagaaaggattttcgagataaaatttattgttagttgttttaagaattttttagatttttgtatttttttttttttttttcgtttattatttttatttggaagtcgttttttttaattaggatttaattgtgaggggcgaggagttttttatgaaaagtcggggatttttatttttaaacgaaaagattgagattgtttttttttttattatttttggtatttttagcggggggagaggaggttatttgaagggaggttggtttgaatgtgagtcgttgtgtttgtgaaatttaggtaaggtaaagatacgtaaatttttgttaatattttttaaaaataagtttttgtttcggggtgagggatgtaggggtggataggaggaaaggagagttaagtaaatgtagaattttttttttttttgttatttatttttttagaatttttgtgggggcggggaggggaagagtatcggtgcgaatttcggggtgttttttcgttcgatttggattttttcgattaaagaggtgggaggagttttttgtagtttgcggggttaagaagaaagtgttaagttgaggagtcgtagtcggaggattttagggattcgataggaagttttcgtacgattttaacggatttatatgttcggaagtttaggcgatattaagttagcgttggggaattgacgtatttttgtagtcgtagggcgttttatgtttttttgtttttttttttgttgtgggtaacgttttttgcgggagatttgaggttttttaagggggatatgttagttatattggttttggcgttttgagttaagtattaggatttatagtttagtacgaaggtaggtagtatttttattcgtcgcggacgataggcgtttttttgtattttttttagttcgcgaggttcgtttttcgcgaggttttagagaaaagtaggttgtggaaaattgggcgttttttttttttatttatttttttatttttgttagcgtcgagatttgtagtagaggtttttggtttgaattatcgattggtaaagaaagttgtagattaaatttttcgttttatagagaaggaaattgaggtttagatagtcgaaggagaggtagtttatggagcgtagcggtaaagagtaaggggttggtggttttagaatggaattttagttttgttaggtaattaatagttgtgtgattttagacgagtttcgtagtttttttgagttttagtttttttattggttaaacgggataatgggatattagcgtttattttatagagttgttttgaggattagataggagagtagtgtgggtttttgatttaattaattttatagtttttgttattattattgtttaaggataggaaataagttagtggtaacgtcgagttgaaattcgggttttttaacgtttagttggaggttttatttattatttttttatttttttagagttaatgggatgtagaggcgaggatagtttttggaaaattatgtggcgttgatatattggtaaagcgtaggtatttcggtttcgaaggtgtataattattgtaatatgaaaaaatcgaggttgggtaggagtagggtagtgaggattttttaatttttatttttatttcggcgttgtttattgtatttgatagagcgcggagttgggttgttatagtcgtaattttagggattagtgcgtacgtttgggtcgtttttcgggagttatttagcggtcgcggataattgaataaatattttaaagcgttgcggtcggttaagggcggggatagttatattgcgcgcggggttcgtaggtcgtaataaagagtggttcgatttcgttgttgtttgtcgcgggagaggaataagttttcgattagcgttttttttcggggttcgcgtttcgagttttacgcgtaagatagtttaatagttgtttttttttttttcgtcgattttaatttttcggaatttgtttattcggggttgtagggtaagtgtttaggatggtttttagtttcgcgttggcggtgaaaattttaacgttatttttttaattaaaaaaaggggggggtaagggaggggttttgtgataattatttttagttttttttgattattttaaaattaagtcgattttttttaattagtttttatttattgttttaatttttttcgttgattttatttgggagttcggaatcgttaggtattgtcgaatgcggtgtaaaattttttttttttttttagttcgtagtgtttggagtcgttggggttattcgtttgttttgatgttatcgcgagatggttttcgagtttttcgagagtttttagtgaaaggatttcgcggtattgtttttattattatatcgtaaatttttttaaattttggaattaattatatagaggatatgttttaatttgttttgtattaatgttatagtggggatggaggttaggtcgtggttagagtagatacgtaggtttatgaaattgatgaattgagagttgtttttagttttgagcgtattatttggaattttagtttgaggttataattagaatttttgattttagatttaattttgtaaataataggggaaaaaaatggggaaaagaaaaattacgagagagggaaaaaaaattattttgtatttgtaaaaaaaaaaaaaaaaaaaaaaaaaaaaaaaaagttatataattttaaaattttttcgttttagataattttttttaagtattttttttgtgttttttaatttataaaagataatggaatgttttatagattggattttattttatttttttttttttttttaattgtttttagtttaatagttgttagttttattttagtgttgaatttaattatataggaataaaatattttttagtaaatttgtttgttaaatattttgttatatttattttttttttgagaaatggtttaattatagaaatttatttgtatttaggaattttttttttttttttttttttgatcgttattttagtttaatcgtaagtagagattttatttgtgtagtaattttatttgtgttttaaattcgtttagttaattttttttttttttttttagtaatattttgtttta

SEQ ID NO: 94 - DNA, 4316 bp, Artificial Sequence
  chemically treated genomic DNA (Homo sapiens)
ttgtagttaataaaaaaaaaaaaagaaagaaagaaattggtttttgttttattttatatgtttaggtataatttttttagagaagaagaggaggggggcggggaggagtaggaggaggaggaaagaaggaggagaaggagaaggagaagaagaggaagaggaagaggaagaagaagaagaagaagaagaggaagaggaagaggaagaagaagaagaagaagaagaagaagaagaagaagaagaagaagaagaagaagaagaagaagaagaggaagaagaggaagaagaagaaattgtttttagatttttatttttaggataagtttattgtttggtattaagttttttggggtgaatttttttttaaaagagttcggggagtttaggtatggaatgggaggtagaaagtttaattaagggattgggatttcggaatgaataatgaagggagatggattgggtttatgtcgaaggtttttttttggttttttagttttcgggcgaagatttagggagatattgagatatattttgtataggagggggagggggagggggagggtaaagttttagggttttaggagtggtttttaagggtttaggtttcgaggcggtgtttggggttggaaggtttagtattgagaattttttatttttttagagttttttttttttttttaattcgtgttaggttttttattttggatatttataacgcggttttattttttatttttattgggcgtcgcgtttttagagaagttaattagtgtcgtcgtagtttttaggttttaaagttttacgtatttcgcgggatttatattttttttagacgcggaggttggggttatggcgtttcgaagtttttttttgttgtttttaggggttttggttttgatcgatatttgggcgggtgagtgcggggtttagagagaaacggtttttgtggggaggagtgaggggttcgttcggtgggggcgtaggatttagggagtcgcgttcggaggagggtttggcgggttttatttttttttcgtttttaggtttttattttttgaggtattttagtatcgttgtgtcgcggttcggtcgcggggagtttcgttatatcgtcgtggagtacgtagacgatacgtaatttttgcggttcgatagcgacgtcgcgatttcgaggatggagtcgcgggagtcgtgggtggagtaagaggggtcgtagtattgggagtggattatagggtacgttaaggttaacgtatagattgatcgagtggttttgaggaatttgtttcgtcgttataattagagcgaggttggtgagtgaattcggtcgggggcgtaggttacgattattttttattcgttacggatcgttcgggttttttcgagttttcggattcgaaatttatttcgaggtagcggattcgtttagattttttattcgggagagttttaggcgtttttatcgaggtttatttttagtttaggttaaaattttcgcgggttgggcggggagggggcggggttagttgggcggggttgattgcggggatcggttagggttttatattttttagggaatgaatggttgcgatatggggttcgacggacgtttttttcgcgggtattattagtacgcgtacgacggtaaggattatatttttttgaacgaggatttgcgtttttggatcgcggcggatatcgtggtttagattatttagcgtttttatgaggtagaggaatatgtagaggagtttaggatttatttggagggcgagtgtttggagttgtttcgtagatatttggagaatgggaaggagacgttatagcgcgtaggtattaggggttatgggcgttttttttattttttgtagattttttgggatggtttcgtataaggttgggaggaaagtgggtttaatgttaggatatcgttttttttttagttttgagtaggaagaatttttttggttttcgagattcggtattagagagtgattgtgagagttcgttttgttttttgggataattaagggatgaaatttttgagggaatggagggaagatagtttttggaatatcgattcgcggttttttttgagttttttaatagttttgggtttcgtgattttttttttaagttttgttttttgttttatatttaatgtgtttggggttttgattttagtttttcggtttttatttaggttagggttagaagtttttgttttttatttagagattcgaattttttaaggaataggagatttttttaggtgtttgtgtttaggttggtgtttgggttttgtgtttttttttttattttaggtgttttgtttatttttaggttggttatatgggtgttgttggggttttttatgaggagtgtaaagtgtttgaattttttgattttttttagattttttaaaggtatacgttgtttattattttatttttgattatgaggttattttgaggtgttgggttttgggtttttattttgcggagattacgttgatttggtagcgggatggggaggaatagatttaggatatagagtttgtggagattaggtttgtaggggatggaattttttagaagtgggtcgttgtggtggtgttttttggagaggaatagagatatatatgttatgtgtagtacgaggggttgttttagttttttattttgagatggggtaaggagggagatgggtaaagaggggaacgaggggttatgtttttttttagggaaagtaggagtttttttggagttttttagtagggttagggttgaggtttggagattagggttttttatttttttttttttttttagagtagtttttttagtttattatttttatcgtgggtatcgttgttggttttgttgtttttggagttgtggttattggagttgtggtcgttgttgtgatgtggaggaagaagagtttaggtaggaaggggtgaggagtggagtttgagtttttttgttttattgggggttgtaagttttaagtagaagtgtgttttgttttattattgggaagtattatttatatttatgggtttatttagtttgggttttgtgtgttagtatttatttatttgtaaagtttttgtgaaaatgaaggatagattttttatttcgatgattatggtggtgatgggatttgattttagtagttataaattataggggaaggtttttgttgatgatagattttaggagggtagttggtttaggatttatatttgttttttttatattttttgattttgttttggatttatagttatatttttttggaaatttttttgggattaaagattaggggtttgttttaggattttatggttttgttttttttttggttttttataggatattttttttttatagatagaaatagagggagttatttttaggttgtaggtaagatgaaggaggttgatttttgagattgttgggatattgtggttaggagtttatgagggagtttatttattttatagtttttttagttatatttgtgggttttgattaggttttgtttttgttttattttaattattgatagtgtttagggttttggggtgttttttatagttaataaaggtgatattttagggtaggggttttgatgtgagtggggtgttgggggggaatagaggggatttagttgtgttattgggtttttttgatttggatgttttgagtatgaaatgggttatttagagtgttattttttattgtgattgatacgaatttgtttatgaatattttttttatagtgtgagatagtttttttgtgtgggattgagaagtaagatattaatgtagtagaattgtatttgtgttttacgaatatatataaattttaaaaataaagaataaaaatatatttttttatagatataggtagatatgtttttatagtatgtacgtaaatgtgtgtgtgtgtgtgtgtgtgtgaagagaaagagtgaatagagagattaagatttttttaatggtgaaaagatatatatatatttggaattagttagtttgatttagtttaggtgattttaattttggtggtaataattaaagtatcgtagttaggagttagtcgaatatatgtttttttttttttattagattgaattagagtgttgattttggttatattaatgttataaatttttttatagtttgtttgatttggtgtttgttggttttaatatttatagtgaatataagtaggttgttgttttttattttttttatagtttatttagtggttagcggaaatttgatgataatatggtggttaagttt

SEQ ID NO: 95 - DNA, 4316 bp, Artificial Sequence
  chemically treated genomic DNA (Homo sapiens)
aagtttgattattatgttattattaagttttcgttgattattgagtaggttgtgaagaagatagaaaataatagtttatttgtgtttattgtggatgttaaagttaataagtattagattaaataggttgtgaagaagtttgtgatattgatgtggttaaagttaatattttgatttagtttgatggagagaggaaggtatatgttcgattggtttttgattacgatgttttggttgttgttattaaaattgggattatttaaattgagttaagttggttaattttaaatatatgtatatttttttattattaaaagaattttaatttttttatttattttttttttttatatatatatatatatatatatatttacgtgtatgttataaaaatatatttatttgtatttataaaaagatatatttttattttttatttttaaaatttatgtatgttcgtgaggtataagtgtaattttgttatattgatattttgttttttagttttatataaggaagttgttttatattatagagaaaatatttatgaataaattcgtattagttatagtgagaggtaatattttaaatagtttattttatgtttaagatatttaagttaaagaaatttaatagtatagttgagttttttttgtttttttttaatattttatttatattagggtttttgttttggagtgttatttttattagttgtgagagatattttagagttttgggtattgttagtgattggggtagaataaaaataggatttggttagagtttatagatgtggttagaggaattgtggggtgggtgagtttttttataggtttttgattataatattttaataattttagggattagttttttttattttatttgtagtttgagagtagttttttttgtttttatttatgggaagaaaatgttttgtgagaggttagaaaggaggtagggttataaggttttagagtaaatttttagtttttgattttagagaagtttttagaaaagtgtaattgtagatttagggtaggattaagaaatatgaagaaagtagatgtgggttttggattaattgtttttttgaggtttgttattagtagggatttttttttgtgatttgtgattgttgggattaggttttattattattataattatcgaagtgaagaatttgttttttatttttataggagttttataaatgagtaggtgttggtatatagggtttaggttgggtagatttatgagtgtggatggtgttttttagtaatgaggtagggtatatttttatttggggtttgtaatttttagtgggataagaaaatttagattttattttttatttttttttatttgagtttttttttttttatattatagtagcgattatagttttagtgattatagttttaaggataataaggttagtaacgatgtttacgatggggatggtgggttggggagattgttttgggaaaggaagggaaggtgaggggttttgatttttaggttttagttttgattttgttgaagagttttagaagggtttttgttttttttgagaaaagatatgatttttcgtttttttttttatttatttttttttttattttattttaggatgaggggttggggtagtttttcgtgttgtatatggtatgtgtatttttgtttttttttagaaggtattattatagcggtttatttttggaaggttttattttttgtaggtttggtttttataagttttgtgttttgggtttgtttttttttatttcgttgttaggttagcgtgattttcgtagggtagaagtttagggtttagtattttagggtggttttatggttagagatggggtggtgggtaacgtgtgtttttggaggatttgagaagagttagaaaatttaggtattttgtattttttatgggaaattttagtagtatttatgtgattaatttgagaatggataggatatttggggtggggaagggagtatagaatttagatattagtttggatatagatatttgggaaaattttttattttttggaaagttcgagtttttgagtggggagtagggatttttggttttgatttaagtggaggtcgagggattggaattagagttttaaatatattgagtgtgaggtagagaataaaatttgagagaaaagttacggggtttaaggttgttggagggtttaaaggggatcgcggatcggtattttagggattgttttttttttatttttttagagattttattttttaattgttttagagagtagggcggatttttatagttattttttggtatcggatttcgaaagttaggaagattttttttatttaggattagagggagggcgatattttagtattgggtttattttttttttaattttgtgcgaggttattttaagagatttataggagatagggaaggcgtttatggtttttggtatttgcgcgttgtagcgttttttttttattttttaagtatttgcggagtaattttaggtattcgttttttaggtaggttttgaatttttttgtatatttttttgttttatagaagcgttgggtgatttgagttacggtgttcgtcgcggtttaggagcgtaggttttcgtttagggagatgtaatttttgtcgtcgtacgcgtgttggtgatattcgcggaggaggcgttcgtcgggttttatgtcgtagttatttattttttggagggtgtgagattttagtcggttttcgtagttagtttcgtttagttagtttcgtttttttttcgtttaattcgcggggattttggtttaaattgaaaatgaatttcggtaaaggcgtttgggattttttcgggtggagggtttgggcgggttcgttgtttcggggtagatttcggattcggagattcggggggattcgggcggttcgtggcggatggggggtggtcgtgatttgcgttttcggtcgggtttatttattagtttcgttttggttgtagcggcggagtaggttttttagggttattcggttagtttgtgcgttggttttggcgtattttgtggtttatttttaatattgcggttttttttgttttatttacggttttcgcggttttattttcggaatcgcggcgtcgttgtcgaatcgtaggaattgcgtgtcgtttacgtattttacggcgatgtagcggggtttttcgcggtcgggtcgcgatatagcggtgttgaaatattttaaggagtgggagtttgggggcgaggagggggtgagattcgttagattttttttcgggcgcggttttttgagttttgcgtttttatcgggcgggttttttatttttttttatagaggtcgtttttttttggatttcgtatttattcgtttaagtatcggttagggttagggtttttgagagtagtaggaggaggtttcggggcgttatgattttaattttcgcgtttgggaaaaatatgagtttcgcggggtgcgtgggattttagaatttgggaattgcggcgatattgattggtttttttagaaacgcgacgtttaatgggagtgagaaatggggtcgcgttatgagtatttaggatgaaggatttgatacgggttgggagagaaagagaaattttggggagatggggaatttttaatattgagttttttaattttagatatcgtttcggggtttgagtttttgagagttatttttggggttttgggattttgtttttttttttttttttttttttttgtgtagggtgtgttttaatgtttttttgagttttcgttcgggggttgagaaattagggagaaattttcggtatggatttagtttatttttttttattatttatttcgaaattttagttttttgattgaattttttgttttttattttatatttggatttttcggatttttttggaagaaaatttattttaaggagtttggtgttagataatgaatttgttttgagaatgaaggtttagagatagttttttttttttttttttttttttttttttttttttttttttttttttttttttttttttttttttttttttttttttttttttttttttttttttttttttttttttttttttttttttttttttttttttttttttttttttttttttttttttttttttttttttttttttttttttttttgttttttttcgttttttttttttttttttttggaaaagttgtatttgagtatatgaaataggatagagattagtttttttttttttttttttttttttattagttgtag

SEQ ID NO: 96 - DNA, 14147 bp, Artificial Sequence
  chemically treated genomic DNA (Homo sapiens)
gggggtattgagtaatatatttagattaataatattttataagtgtgagtattattgatttaaatttttttgttggttgtgttttgtgtttatgtttgttttatatttattttttttagagttgttttttttagagttttagtaatttttatttttttaaatttttttagttatgggaaggattagtaggtgttagtggatttaaaagaattttagatttgttgagatttttgatttttggtgtttagattaattagtaaatagtttaattaaacggtttgtttttatggttaatataattttgaattggtggttatttagattaagtttattttgtttttgagacggaattttgtttttgtcgtttaggttggagtgtagtggtgcgattttggtttattgtaatttttgttttttgggtttaagggatttttttgttttagttttttaagtagttgggattataggtatttattattattttcgattaatttttgtatttttagtagagatagggttttgttatgttggttaggttggttttaaatttcgattttagatgatttgtttattttagtttttttaagtgttgggattgtaggtgtgagttatcgcgtttagttaaagtttagtttgtataagaaggttttttttgttatgttataggatttttgagtttattaaatagattttaatgttttgagattttacgtatttttttaaaatgaagtatttaaattgttagtgtttgtttttttgtttggtttttttgatgtattgatttggtttgttagtgtgatgaaaaatatggttgagttttattgttttattgtaattagtaggattgtttagaagtttaatttttttaagagatgaagatttgagtttatgtagttggttgttttttaaaaatatttggttatttgggatatattttgaattaattttttggttattttatgtgattaaaagtgttagttttttttgtttttagtatatttttttgtttgggaagtggaagggatgaaatttttatatttttttttgatgatatagaaaggagtatatatttatattttatgaatagatatgtaattatagaagaaatagtttaacggtcgggcgcggtggtttatatttgtaattttagtattttgggaggtcgaggtgggtggattacgaggttaggagtttaagattagtttgtttaagatagtgaaatttcgtttttattaaaaatataaaaaattagtcgggaacggtggtaggcgtttgtaattttagttatttaggaggttgaggtaggagaatcgtttgaattcggagggtggaggttgtagtgagtcgagattacgttattgtattttagtttgggcgatatagtgagattttattttaaaaaaaaaaaaaaaagtataattatatgattatttatattgttttatatattaaattagtagtaatttgttttttatatagtaaataaaaataaattagtagtaataaatatattttttttgtgttatagttagtatttggtgaattttgtattttttttttttttaaagtgttgaatttataggtttttataaggtaagtttatattattaattaattttgtttttttttttgatgttaaaattgttttttaggagttgattaggtttatttttttgttttttaagtattatttttagaatatttttgaaagtatttttgttttttggtaataatatttatattttatttattttttgtttttaaatatatatttagttaattttaggttttttttaatggagtagttatttatttatttaatatacgttgggtgttttttttgtgttatatattgttttggtttttggggatagagtaggaaataaaaaaaaataaaatttgtttttatatagttgatattttagttaggggagataaataataaataaatgaatgatgtagtatgttagatgttgatagtgttatggagaaagtatattatggagattagaagtattatttgtaatggaatagttatgattttaagaagaatggttgattggatgtgaagtgtgagagagaggagtttaggtttttggttgagtaattggagggatggagttgttattatttgagatggagaagttaggggaggagtagatttggaggggaaggttaggaatttagtttggaatttgttaagtatgaggtatttattaaatattgaagtggatttttagaagatgttattaaaattagttaagtttaggagagagttttgggttagaaataaaaatgtgggagatattggtatatatatgggtttatattatttttttttttaatttaatattttattttattgttttttgtttttttaatagtatttagttttatttattttttaaattgatttttatattgatagtataataaaatttatattttttattatattaagattttgtgtgatttaatttttttttattttttggattttgttttaggttattttttttttttatttaatttttaatattttgattttattgttttttaaatagttttttgttgttttttgttttttttgtggaaaaggtttttttattgtttaattattaggtatttttcgatttttttttattttttatttttgagaaaggttttttttgattttttatattaattaggatttttttgggcgagatttgatttaaattggtttagagaaaaggagttaattgattggtttatgtaatttaattttttttttttgttgtaatttttttttggtttttattttatttaaggttaaagttagggtttttattatggttttgtaggttttatatagtttgttttttttattatttttttgattttattttttatattttttttttatttatttttttttagttagagtggtttttttgttgtattttaaatatgttaggtatatttttattttagtgtttttgtgtttgttgttttttgtgtgtggaatatattttttatatagttatattatttaaaatttattgtttttaagtttttatttaaatgttttttcgtgaagttatttttgagttttttttaaaattgtagttttttatttttgtattttttattgttttttatttttaatttttgttattgtagttagaattatttgatatatagtttttattttattggttttttgttatgtttttttttataagaatttgaagtttattaggtcgggagttttgtttgttgtgtttgttgttattttttagtgtttaaaattgtttggtatatagtaggtatttaataatttttgaattagtgaaaattagatggtggtttggtatttttatataggaatgagttaggtggaaattatttaggatataagtagattttgaagtgataaggaagggttattataattatgtggggtttattttgtttttttttgttttttttttttaggtttagtaatagttttattaaggattttatgaatattaaagtttatatttatatgttgttagaggtgagagtagtttattttattattagattttgtgtttagggtggtgatttgaagaaggaagagagcgaaagaagggaaggattatttttttttttaaattggagttaagggagggaggttagagtaagtttgggggcgtaatttagatttagtttttgtttaattttttttgtttttttttttaggggtttagagaattataaggtttgtagaattttttagagaagttttattattgattttttttttttatttttagatattaaagagtttgaatgtttttgagttatatggtttttttttttttttataaattttgttagttgttacgggggtttgtttttagggtataaagttattgagagatttagagatttagtttttttgtggaatttttaaaatgttttagtagttttgtttttagtttgttgtttggtagtatttgttagttgattttatgtattgtttttttttttgttattttggtaatttgggttttttattttatttttttttttatttttttttttagacgttattttttgaattgttatagagaatgggttaatttatggtggaggtttgtttatttttataataattaaagggttttaaggtttacgtttttatatatttaattattttttaggtattttaaattatatttaaattttaatttagttttattttgttttagtttttgtttgtaagtgttttagtttttaatgggtatagatttggatttcgttttttttagtcgggtttttattttaggttgagtttagttatcgttaattaatgtagagttaggttttttttttttttaattttggtcgtagtttaattttgttttttgaaagtatttcgtttttgttatttaatgttttttcgtgtgtttgatagttattttgtttttttattttcgttgtgttttaaattcgtttttatttagttttatggttttgtttaatcgtagagttgttttgttcgtttacgcggagtttagttcgatttattttcgtcggttgttacgtttatttttatataagttttgttttcgttgagtagtatggcgtgcgatatcgtttttttggtgttttggtaggggtttagaagtttttcgttcgttaattagagaaaaatagggttatttattttcgtttttgggggttgttttttattaattttatgtaagttaattagtgtgaggtagattttcgttttttcgatataggtttcgagtttttttagttgtttatagttcgttagtttttgagttaatcggcgtggagtatcgtgaaggtcgaacgcgttttttcgggattttaggggtcgtgagcgttttattatttttttttacgttaattacggtatagttttgtagggaagggttcgttttttaatttttcgaggttttgcggtcgattaatagcgttttggttaattagcgagcggcgggatattgggtttttttttttcgggtttacgtgagttgtagggaaacgtaggggcggtttttaggtgttgtcgtcgttatcgttattattatttttatcgtcgtttcggaatttaggtttggggggcggtggggtcgcgtatggagttttcgtttttcggagttgttaatattgttaacgttatcgttacgttatatataggtgagttttgggtttggagggtggagggtttagttcgtgattttacgtatttttttcgttttcgcgtagaggatgtggtttggtcggtggtttgttggtgttcgatttttcgtcgttattattacggttggtggatttgcgtgtggtattgtttaagtttttcgttttttatagtggatttgatcgtggtttaatttttttttttcgttgtataatggatcggtttgcgtgtttatgtttttttttacgttaatttagggtggattcgtttataggttttttttttatttttatttttattcgttttttatttatttttatttatagggagttagtttgtgatagtgtttagtttttttaatagtaggtgtatttgagtgtttggattttttttagttttaatttttaggagattcgttcgtggttttatttattttattttttttgtatatcgtagcgaattaattcgtggcgtcgtattttttcgtatttttttttaatagtgagtttatttgagtttgtatttttgttttttttagttttttaatgtattagtttatggttttttttaaaattattttttttttttattattattattattattttatagtggattagtttttatgtttggatttacgtttttttagttattagtttattgttttgttttttttttttcgtagattgtcgttttagcgtttggggtttttttttttttaatagtgggttagtttagtgttttatatttttttatttttagtagtttagtttatagttttttttttttttgttttgaattagtttgtgtgatggtttttttttttttttattgtggtgtaggagtttgtaaggttttttgttttttttttttttagacgatgagttttattatttttttttttgtagtggatttgtttattggttttttttttttatatttttgtatgtttgtatagtttttcgtatattttttcgtgagtttagtgttttgtaattgggggaagatcggtcgtgtatttttaatttttttttttttttttttttttttttagaagagaacgtgttgatttttttttttttgtgatggagtattgtacggttttttttgttttttattttttaatagtgggttagtttggttatattcgtaattataaagacgttttgttttattataataagtgaatatattagcgttagtgatgatagtaatgttaataggagttagcgtttattgagtatttgtcgtatattaggtagagtgttttatatgaatgagtttttttaatttttattataattttatgagataggtagtgagggaattgggttatagggaggttaaattttttatttaaaggtggtttaggaagtatttaggatataggataatttttgaggttttttttttagattttattttattttacgtgaggttttagtttttaaaaattaaattagtttttatttttaagtttttgtttttgttgttttttttgtttgtagagtagtttttattttttatttttttttagtatttatttattttttaattttagtagttgtgtgattttagatgagtgatttaattattttttttttgtgtttttttttttatttgtgaaatgggggattagaattagaattttttttagtgtaaataaatattaattgtgaattaatggtaaaataagtaatttttttagtattatcgtttatatttttttatttttttattgtgttttaattatattggttttattatatagttttttaaatatagtaggtatgggttagttttagggtttttgtattggttgttttttgtgttttgaatattatttttagatttttgtatggttttttttagtattttgtttaaatattaatttttaaaggatgtttattatattgtggtgtgtggaatgtagtataaaaagatatatgtatgaaagatgtttttaagaatgttagtttatatatgagtaagggttttttttttttttaaaaggatgtgtttataagattgaggtacgtaatatgttttgtaaaggtataggtataaaagttgtttttaagagtgttagttgtatatgtgaataaggattgtgttgttgtattgaaagaatgtgtttataaaattgtggtgtgtagttgggtataggggtgtgtatttatagttttagttattcgggaggttgaggtgggaggatagtttgagtttaggagttttaggttagtttgggtaatatagcgagatttttttttttgaaaaaaaaaaatttaaaaaataattattgtggtgtgtgtaatatatttttttaaaggtataggcgtaaaagatgtttttaagagtgatttgattttgttgtatttgggtagtgttattttattaaaggttgattgttatattatggtatttagaatatattatataaaggtatatgtataaaaaagaagtttttaataatgttatttgtaaaaataaaaaaagttaatttttttttgattatttgaagttgtatatttagtagggtttaagttaggtttttgatttgtttcgttgttttttattattgtttgatatattgtgtgggttatttgtttgttgtttgtttttttttattagaatgtgagttttatgaggatttagtttttgtttgtttatttatcgttatgtttttagtaattgaaaatgtattaggtaaatagtagatgtttaataagaatttattttatgaataaatgggaaaaagataatttgagatattagtgtaggggttatatgaggaagaagaagggatatgagagttaattagttgggattgtttttgtaattaatttttattgagttttttgtgagtattaggtatttttttaggtgttggaatatggtaaggaacgaaatagggcgaaatatttgtgtttgtggagttgatatttattaaaagttggggaggttgggtacggtggttaatattagtaattttagtattttgggaggttgaggtgggtggattgtttgagtttaggagtttaagattagtttgggtattacggtgaaattttatttttattaaaatataaaaaaattagttgggtgtggcggcgtgcgtttgtaattttagttatttgggaggttgaggtaggagaattgtttgaatttaggaggcggaggttgtagtgagttaagattgtattatgtattttagtatgggtgatagagcgagattttgttttaaaaaaaaaaaaaaaaaaatttaagttggggagatagattatgtgaataaaataaataagtaaaattagtataatagataaatgttgagaagaaataatgaaatagggtaggtaggaatcgagtattgggggtggttgaaattttaggtatagggaaggtgatttttgaattagggttttacggtagagacggagagagttttaatgtttacgggaagagtatattaggtagaaggaagtgttagtttagaggttttgaggtgggatggtgtttgttatgtttaaggaatattaaggcggttagtgtggttggagtagagtgcggggaagggtagaaggtgaggttatataggtgatgggagttagatagtgtaggtgatatataggataggattgtaggggtagggggagaaggatgatatattagttaatagttaatatttgtggagtatttgttatatattagaggtatttttttgtttaaatattaatttttaaaggatgtttattatacggtggtgtttggaatgtattataaaaagatatatgtgttaaagatatttttaagaatgttagtttatatatgaataaggattttttttttttttaaaaggatatgtttataaaattgaggtatgtaatatgttttatggaggtataggtataaaagttgtttttaagagtgttagttgtatatgtgaataaggattgtgttgttgtattgaaagaatgtgtttataaaattgtggtgtatagttgggtatagaggttgaggtgggaggattatttgagtttaggagttttaggttagtttgtgtaatatagtgagattttcgttttcgaaaaaaaatttaaaaaataattattgtggtgtgtataatatatttttttaaaggtataggtataaaagatgtttttaagagtgatttgattttttggtatttgggtagtgttattttagtaaatatttattgttaaatattatggtgtttggaatatattatataaaggtatatgtataaaaaagaagtttttaataatgttatttgtaaaaataaaaaaaaaagttaattttttaagttttttatagaagtattttatagaattgatatagttaatttttatagaagttttggagggtaggtgtatttttgagaatatttgattttgagagtaaaatatttttattttatagatgaggaaataagtaaagagaggttgagtaatttgtttagggtaattttgagttagaatagttagaataggggtagaggaatataaggttgaagatttagaaagaagaatagatttgtaagggtaggtaggttatttggtatttttgattacgtagaggaagaatgaattttttttggaatgcgatgattgtgtaattgagtttatgaagtgagggaagagttttttttgcggggagagtagttcgtgtttatttttagaggttggaattgtttcgggaacggtagatagtttagggtggttgttttagagtttttgtatacgtcgttcgtttcgtttgaaggtttttttttatagagggtagtttggtttgttatttttttttttttaggttaggtgttatttttttggggaagaattttttgtatattttgtgtaaaaatagtatttttgttattttttaggattttatttttttttgtttttttttatggagaattggtggtgtaaggcgattgtttattagagttaaattatttaggttttgaatttcggttttgttaatttttagttgtgtgatttggggtaggttatttttttgtatttttattgttttatgtggaaaatgggggaaatgataatttttattttttaacggtggtttgaggatttaatgagttaaatgatttaaagagtgtgtagtttacggtaaggatcgtatgtttggtttgtatttttaaattattaaaatgtatttatagtatattcgtagatgtttgataggtttttgaaattgattatttttaaaattggtgtgattttttttaaaatttatttttttgtaaggtttttattttagttgattataatgttgtttttgtgggtgattaggttataaatttagatttattttggattttttttttatttttttcgggtatgttatttgttagtaagttttattttgtgtttaggttttttttagattttagttatttttcgttagttttattgttattattattatttatcgtagtggtttttttagttttaatagtttgttttttttataatcgttagggggattttgttgaaattttagttatagtttgttatttttttgtttataatttttttgtggtttttgttttatttaatattttgatagtattcgaaaaagtttggtttagtttggttttcgttattttgtttttttttttcgttgttttttttttttttttcgaatttatgttagttttttttttttatgttatttgttaggtattttttagttttgggttttttatatcggttgtcgtttttatttggtttgttgtttttagatatttacgagtttagtttttttatttttttttggtttttgtttagttgttttttttttggcgattatttttttttgattttttatgtaaaagtaatagtttttttttgtttgattttttttttataatttttattattatttgacgtatttttgtatatgtttgtttttttttttatttgttttttttgttaagatgtgagtttttttggagtagggattgttgtttgttgcgttttcgattgtattcgtagtatttggtttatagtatgtatttattaaatgtttgttaagtgaaggagatggaaagaagtaaatatatttaagtaaggtagattattagaatttttatgaggggttaagtgggagaaataataaaatataaagttttgtgtgttgttgaagttggaagtttatcgttattttttatttagttgataggttttgttgtagttgaaagaagaattggtaaaattgtttgtttttgttattaggagttattttgaattttttggatttttgaaataagtttgtttgtaaaataaatttagtgaggtttttggtgataggattttttaatcggatattttatggttttgtgatttgtataattgaataggaagtttatgtttatttttagtttgtttttaggaaagaaagtagtaatggggtgatagggaggattttgttttttgaaggatatgttgagagggaatagtcggtgtgaggggtcgtttagtttaatggtgaaatgtttagttaattggaatttgattgtttggttttaaatgttggttttgttatatgtggtttgtggaaggtacgtagatatttgtgttttcgttgttttatttataagttaatgataggaagattatttattttttagaggtatgattagggataaataagttaatgtttattaaaaaaaaaaataatagtataggtgtatatgtttttatttaaaatttttggggttagatgtgttttagaatttttatttttttatattttagaaaggtaatatgatgtatatacgatgttatataatattttttagtaagttttgtaatcggttgtgtttatatttttgtagtaaaatgtatgaatattcgtaataagtgagatttaataaagattagaaagggttttgttttattttaaattaggttttgttattaaaagagttaaaagaagttttttgtttttagagtattttggatgttggaatggtagataagggattatgaataaattagaaattaatatttagagtttattatatattttaggtatataatatttaatttgtataatatttttgtgaattaggtattgttatttttattttattaatgggtatattattatttttgttttatatatgagaaaattgaggtataaagaggttaaagaatattagttaagcgtggtgttttatgtttgtaattttagtattttaggaggttagggagagaggattgtttgagtttaggagtttaagaatagtttgggtaatatagtgagattttattttttaaaaaaagaaaaagaatatgtttagggttatatagttaataagtggtagaattaggatttaaatattggtaatttggttttagtgtttgggtagttgtttagtaggttatattgtttttttgtttagaagagtgtttgatgtgtattaagtttttaatagatgttaattattgttgttattaagaaagagaatatttagggtcgagtacggtattttatatttgtaattttagtattttgggaagttaaggtgggaggtgggtggattatttgaggttaggagtttaagattagtttggttaatatggtgaaattatgtttttattaaaaatataaaaattagtcgggcgtggtcgtgggtatttgtaattttagttatgcgggaggttgaggtatgagaatcgtttgaatttgggaggtagaggttgtagtgagttaagattgtgttattatattgcgttttagtttgggtaatagagagagattttattttaaaaaaaaagaaaaaaaaaaaaagaacgagaatatttagggatagtaataggatagagagattaggtatttatttagttttaggacggttttataaaggaaaggatttttgggttgggatttgaaagataagaaagattgttaggcgaaagaaggaagttttacgtggagtgagtagtttttgtaagggtttggtaaaaaaaaaattttttgaaaaatttgatattgatatggtagaagatatagataatatttaaatgaggaggatggaattagttttttatttttgttgtaataaataattataaatttagttgtttaaaataatatatttgttattttatagttttgtaggttagaagttttatattggttttagttgaaattaaggtattggtagggttgcgttttttttggaggttttaggggaaaatttattttttgtttatttaagttgttggtagaatttaattttttgagattgtaggattgaagtttttgtttttttattgtttgttagttgatagttatttttagttttaagaggttgtttatagtttttgattttgagttttttttttttatttttaaagttaataatggtaggttgagttttttttatattttgaattttttttgttttttttgttattatatttttgagttatttttttttttttattatttgttttttagagtttatatgattagattgaattttattaaataatttagaaataatttttttgttttagggtttgtaattttaattttatttgtaaagtttttttttgttatgtagtgtaaataatatataggtttcgaggattaggatgcggagtagggttggtattatttggtttattatagtttgttttttgatttttatagatttatatttgttttatatttaaaatatatttatattattttaagatatttatgagttgtattttattatagggagtattttaagtaagattggggagttagaagttagtttgggaaggtttagggaatgatggtagggtttgaagatagagatggagaaaagatgataaaaaaaggaatttttttttcgttgatttttgttttttttatgtttatagttttttaatttagttgtttgttttttagg

SEQ ID NO: 97 - DNA, 14147 bp, Artificial Sequence
  chemically treated genomic DNA (Homo sapiens)
tttggagagtaaatagttgagttgagaggttgtggatataggaggggtagaggttagcgggaggaggatttttttttttgttattttttttttatttttgtttttaaattttattattattttttaaatttttttagattaatttttagttttttagttttgtttgggatgttttttgtgatgggatataatttatgggtattttaggatggtgtgaatgtattttgaatgtgaaataaatgtgaatttgtgggggttagagggtagattgtggtaggttaaatgatgttaattttgtttcgtattttaattttcggaatttgtatgttatttatattatatagtagaaaggaattttgtagatgaaattaaggttataaattttaagatagggagattatttttggattatttgatgaaatttaatttaattatatgagttttgaaaagtagatgatggagaaagaaaggtagtttagagatgtgatgatagaagaggtaggggagatttaaaatgtgagagggatttaatttgttattgttggttttgaagatggaggaaggaggtttagaattaaggattgtgggtagttttttaaagttgggaatggttgttagttgatagatagtaaggaaatagggattttagttttataattttaaggaattggattttgttaataatttgaatgagtaggaaatggatttttttttagagtttttagaaggaacgtaattttgttaatattttgattttagttgagattagtgtgggatttttgatttatagaattgtaagataataaatgtgttgttttaagtagttaaatttgtgattatttgttatagtaagaatagaaaattagttttattttttttatttgaatattatttgtattttttattatattaatgttaagttttttaggaggttttttttttgttagatttttgtaaaggttgtttattttacgtggggtttttttttttcgtttagtagttttttttattttttaagttttagtttaaaggtttttttttttatgaagtcgttttaaaattgaatgaatgtttgatttttttgttttgttattgtttttgaatgttttcgttttttttttttttttttttttttttgagatggagtttttttttgttgtttaggttggagcgtagtatagtggtataattttgatttattgtaatttttgttttttaggtttaagcgatttttatgttttagtttttcgtatagttgggattataggtatttacgattacgttcggttaatttttgtatttttagtagagatatggttttattatgttggttagattggttttgaatttttgattttaagtgatttatttattttttattttggttttttaaagtgttaggattataggtgtgagatatcgtgttcggttttgaatatttttttttttgatgatagtaataattaatatttattgagagtttaatatatattaggtatttttttaagtagagaggtaatatggtttgttggataattgtttaggtattagggttagattgttagtgtttgaattttggttttgttatttattagttgtgtgattttgggtatattttttttttttttttaagaaatggggttttattatgttgtttaggttgtttttgaatttttgggtttaagtaattttttttttttggttttttaaagtgttaggattataggtatgaggtattacgtttggttgatattttttaatttttttgtattttaatttttttatgtgtaaaatagggataatgatatgtttattagtaaaatggggataataatatttagtttatagagatattgtatagattaaatattatatgtttgaggtgtatgataagttttaaatattagtttttgatttgtttatagttttttatttgttattttaatatttaaaatgttttaagggtagaaagttttttttaatttttttggtggtaaaatttgatttgaaatgaaataaggttttttttggtttttattgaattttatttattgcgagtgtttatatattttgttgtagaaatatgaatatagtcgattatagagtttattaaggggtgttatgtaatatcgtatatgtattatgttatttttttgaaatgtgaagaaatggaaattttgaaatatatttggttttaggggttttgggtaagggtatgtatatttgtattgttatttttttttttaatgggtattgatttatttatttttgattatgtttttgagaagtaggtagtttttttgttattaatttataaatgaggtagcggaggtataaatgtttacgtattttttataggttatatgtggtaaagttagtatttggagttaggtagttaggttttagttgattaagtattttattattaggttaaacggttttttatatcgattatttttttttagtatgttttttaaagaataggattttttttgttattttattattgtttttttttttgagagtaaattggaaataaatatgagttttttgtttaattatataagttataaagttatgaagtgttcgattagagagttttgttattagagattttattgaatttgttttgtaggtaggtttgttttagaagtttaaagagtttagagtgatttttggtggtaaagataggtaattttattagttttttttttagttgtaatagaatttattagttgagtgaaaggtgacggtgggtttttagttttaatagtatatagggttttgtattttgttattttttttatttgattttttataagagttttagtaatttgttttgtttagatatgtttatttttttttattttttttatttagtaagtatttggtgagtgtatattgtgggttaggtgttgcggatatagtcgagaacgtaatagataataatttttgttttagaggagtttatattttagtaggaaaggtagatgagaaaaaaggtaaatatgtataagagtgcgttagatggtggtaagggttatgggaaaaaaattaagtaggggagagttgttatttttatatggagagttaggggagagtagtcgttaaggaggggataattgggtagagattaaaaggaggtgaaggaattgagttcgtgagtatttgagagtagtaagttaggtggaagcggtagtcggtgtgaagggtttaaggttggagagtgtttggtaggtgatatggggagaggaggttgatatgggttcgggggagaggagggaggtagcgggagaggagaatagagtgacgggggttagattgagttaggttttttcgggtgttgttaggatgttgagtgagataggagttataagagggttgtgaatagagggatgataggttgtgattgagattttaataggatttttttggcggttgtgagaagaatagattgttggggttgaagaagttattgcggtagatgatggtggtagtagtggggttggcgagaagtagttggggtttggagaaagtttgaatatagaataggatttgttgatagatagtatgttcgggggaggtgagagaagggtttagggtgagtttaggtttgtggtttaattatttataaagatagtattgtggttagttgaggtgggagttttgtaggagagtaagttttgaggggggttatattagttttggagatggttagttttagaggtttgttagatatttacgggtatgttatgaatatattttaataatttaaaaatgtaagttaggtatacgatttttatcgtgggttgtatattttttgaattatttaatttattgaatttttaaattatcgttaaagggtggggattattattttttttattttttatatgaggtaatggaggtatagagaagtaatttgttttaagttatatagttggaagttggtagagtcggaatttaaaatttaagtggtttggttttagtgagtaatcgttttatattattagttttttatgaagagaaatagagaagggtaagattttagagagtgataggaatgttgtttttatatagggtgtataaggagtttttttttaaggaagtgatatttggtttgaaggaggggaggtagtaagttaggttgttttttgtgggggagggtttttaggcggagcgaacggcgtgtataaaggttttgaggtagttattttgaattatttatcgttttcgagatagttttaatttttgagggtaagtacgggttgtttttttcgtagggagagttttttttttattttatggatttaattatataattatcgtattttaggaagaatttattttttttttgcgtgattaaaggtgttaaataatttgtttgtttttgtaaatttgtttttttttttgagtttttagttttatgtttttttgtttttgttttggttattttggtttaaggttattttgagtaagttatttagtttttttttgtttgtttttttatttgtaaaatggggatattttatttttaaagttaaatatttttaaaagtatatttattttttaaggtttttgtgaggattaattgtgttaattttgtaaaatatttttgtaaaagatttgaggggttgatttttttttttgtttttataagtagtattgttaggaattttttttttatatatgtgtttttgtatagtatattttaagtattatagtgtttaataatgaatatttattgaaataatattatttaggtgttagaaaattaaattatttttagaaatattttttatgtttgtgtttttaggagagtgtattatgtatattatagtggttattttttgggttttttttcggagacggggattttattatgttgtataggttggtttggaatttttgggtttaagtgatttttttattttagtttttgtgtttagttatatattatagttttgtgaatatatttttttaatgtaataatatagtttttatttatatatataattagtatttttagaaatagtttttatatttgtgtttttatagagtatattatatattttagttttgtgaatatatttttttgaaaaggaggaaaatttttatttatatataaattggtatttttagaaatatttttgatatatgtatttttttgtagtgtattttaggtattatcgtgtggtaaatattttttgggggttggtatttgaatagaaaagtgtttttgatgtgtggtagatattttatagatattagttattagttagtgtgttatttttttttttttgtttttgtaattttattttatgtattatttgtattatttggtttttattatttgtgtgattttattttttattttttttcgtattttgttttagttatattggtcgttttgatgttttttgaatatggtaggtattattttattttagggtttttgaattggtatttttttttgtttggtatgtttttttcgtagatattaaggtttttttcgtttttatcgtgaggttttaatttaagagttattttttttatgtttaagattttaattatttttaatattcgatttttatttgttttattttattatttttttttagtatttgtttattatgttaattttatttatttattttgtttatatagtttgtttttttagtttgggtttttttttttttttttttgagatagagtttcgttttgttatttatgttggagtgtatggtgtaattttggtttattgtaattttcgttttttgggtttaagtaatttttttgttttagttttttaagtaattgggattataggcgtacgtcgttatatttagttaatttttttgtattttagtagagatggggttttatcgtgatgtttaggttggttttgaatttttgagtttaggtaatttatttattttagttttttaaagtgttaggattattggtgttagttatcgtgtttagtttttttaatttttaataaatgttagttttataagtataaatatttcgttttgtttcgttttttgttatattttagtatttagaagagtgtttggtatttataaggggtttagtaaaggttggttgtaggaatagttttaattaattagtttttatattttttttttttttttatgtgatttttatattggtgttttaaattattttttttttatttatttatgggataaatttttattgagtatttgttgtttatttggtatatttttagttgttggagatatagcggtgaatgagtagataaaaattgagtttttatgggatttatattttaatgaggagagatagataataaataagtaatttatatagtgtgttagatagtgataaagggtaacgggataaattagggatttggtttgagttttgttgggtgtgtagttttagatggttagggaggggttgattttttttgtttttataagtagtattgttaggaattttttttttatatatgtgtttttgtatagtatattttaagtattatggtgtgataattaatttttaatgaaataatattatttaggtataataaaattaaattatttttagaaatattttttacgtttgtgtttttaagagagtgtattatatatattatagtggttgttttttgggttttttttttttagaaaaagggatttcgttatattgtttaggttggtttggaatttttgggtttaagttatttttttattttagtttttcgagtagttgggattataagtgtatatttttgtgtttagttatatattatagttttgtgaatatatttttttaatgtaataatatagtttttatttatatatataattagtatttttagaaatagtttttatatttatgtttttatagagtatattacgtattttagttttgtgaatatatttttttgaaaaggaggaaaatttttatttatatataaattggtatttttagaaatattttttatatatgtatttttttatattgtattttatatattatagtgtggtaaatattttttgggggttggtatttgaatagagtgttgaaaggaattatgtagagatttgggggtggtgtttaaggtataaagaatagttaatgtaaaggttttgaggttggtttatgtttgttatgtttgaggagttgtgtggtggaattagtgtggttggagtatagtaagggggtgggaaggtataggcggtaatgttagaaaggttatttgttttattattaatttatagttaatatttatttatattggaagggattttagttttgattttttattttataaatgaagaaaaaggtatagagaggaagtggttaaattatttatttaaggttatatagttgttgggattggggggtgggtgggtgttgagagaaggtgaggaatgaagattgttttgtaggtagagggaatagtaagaataaaagtttggaggtgagaattaatttggtttttaaggattgaggttttacgtggggtgggatgagatttaagaggggagttttaaaaattattttgtgttttgagtattttttgggttatttttgagtaaggaatttaatttttttatggtttaatttttttattatttattttatggggttgtggtgaggattaaaggaatttatttatatgaaatattttgtttgatatacggtaggtgtttaataaacgttagtttttattggtattattattattattggcgttaatgtatttatttattgtagtgaggtagaacgtttttgtggttacgagtgtgattaggttgatttattattaagaggtggaggatagggaaggtcgtatagtgttttattataaggaaaagaggattagtacgtttttttttgggaagggaaaaaaaaagagaaggaaattgaaagtatacggtcgatttttttttaattataaagtattggatttacgggagggtatgcgggggattgtgtaagtatataggggtgtgggggaggaaggttaatgaatagatttattgtaaagggaggggtgatgaggtttatcgtttgaggggaaggggagtagaaaattttatagatttttgtattatagtgagaggagagaaaagttattatatagattgatttaaagtagagagggaaaaggttatggattgagttattgaaaatagggagatgtaaagtattaaattaatttattattaaaaaggagagaattttaagcgttagagcgatagtttacgaaaaagaggagatagggtaatggattgatagttaaagggacgtgaatttaaatatgaagattgatttattataaaatggtggtggtggtggtggggggggggggtggttttgaaaaaagttatggattgatgtattgggggattggaggaggtaggaatataaatttaggtagatttattgttaaagagggatgcggaggagtgcggcgttacggattgattcgttacgatgtataggaagggtggaataaataaggttacggacgggttttttgaaagttgaggttaggagaaatttaaatatttagatatatttattattaagggggttgaatattgttataggttagttttttataagtgggggtgggtggggggcgggtgggggtaggggtagggggaaagtttatggacgagtttattttaagttggcgtggggaaaaatataagtacgtagatcgatttattatataacgggagggggaggttaggttacggttagatttattataagggacgaagggtttgagtaatgttatacgtaggtttattagtcgtggtggtggcggcggggagtcgaatattagtaggttatcggttaagttatattttttgcgcgggggcgggaaggatacgtggggttacggattgggttttttattttttaggtttagagtttatttgtgtgtagcgtggcggtggcgttggtaatgttggtagtttcggggggcgggggttttatacgcggttttatcgttttttaggtttgggtttcgaggcggcggtggaggtggtggtggcggtggcggcggtagtatttagaagtcgtttttgcgtttttttatagtttacgtgggttcgaggaggaggagtttaatgtttcgtcgttcgttgattggttaaagcgttattaatcggtcgtaaggtttcgaggggttgggggacgggtttttttttatagagttgtgtcgtgattggcgtaaggggaaatgatggaacgtttacggtttttggagtttcgaggaggcgcgttcggtttttacggtgttttacgtcgattggtttaaggattgacggattgtgagtaattgaaaaggttcggggtttgtgtcgggggggcgggggtttgttttatattgattggtttatatgggattgatggaagatagtttttaaggacgggggtgggtggttttgtttttttttgattggcggacgagggatttttagatttttgttaaaatattaagggggcggtgtcgtacgttatgttgtttagcggaagtagggtttgtatagaaatgggcgtagtagtcggcgggagtgggtcggattgggtttcgcgtaggcgggtagggtagttttacggttagataagattatagagttgggtaaagacgaatttagaatatagcggaggtaggagggtaggatggttgttaggtatacgaaagagtattgagtggtagaaacgaaatgtttttagagggtagggttgaattgcggttagagttaaaaaggggaggaatttggttttgtattgattggcggtggttggatttaatttagaataggggttcgattagggagagcgggatttaggtttgtgtttattggaagttggaatatttataagtaggggttaagataaggtagggttgagttagggtttgggtgtaatttggggtatttggggaatgattgggtgtgtgaaagcgtaaattttagggttttttgattgttgtgggaatgaataaatttttattatgaattggtttattttttatggtaatttaaagggtggcgtttaggaaaaggaatggaagaaagggtgaggtggggggtttaggttgttaagatgatagaagagagggtagtgtataaggttaattggtaaatattgttaggtaataggttggaggtaggattgttggggtattttggaggttttatagagagattggatttttgggttttttagtaattttgtgttttaggaataggttttcgtggtaattagtagggtttatggggaaaaagaagggttatgtgatttaaaggtatttaggttttttaatgtttgaggatggggggaagaagttaatggtgaggtttttttgggaaattttgtaggttttgtagttttttaagtttttgaaaaagaggatagaagagattgaataaagattgggtttgggttacgtttttaggtttgttttgattttttttttttgattttagtttagagggaaagatggttttttttttttttcgtttttttttttttttaggttattattttaaatatagagtttggtagtggggtgagttgtttttatttttagtaatatgtggatatgggttttgatatttatggagtttttggtgaggttgttgttgagtttagagaaaagaaataagaaagggtaaaatgggttttatatgattatgatgatttttttttattattttaagatttatttatattttggatgatttttatttggtttatttttatgtggaaatgttaagttattatttggtttttattgatttaaagattattaaatgtttattgtatgttaggtaattttaggtattgggagatagtagtaaatataataaataaaattttcggtttgatggattttaaatttttgtaaagaaagatataataaaaaattaatggaataaaagttatgtgttagatggttttaattataataataaaaattaaaaatgagagataataaggagtataggagtggggggttgtaattttaaagagggtttagggatggttttacggagaagtatttgagtaaagatttaaagatagtgaattttgagtagtgtggttatatggaggatgtgttttatatataaggggtagtaaatataaaggtattgaggtgggagtgtgtttggtatgtttgaggtgtagtaaagaggttattttggttggagaagaataagtgaagggggaatgtaagaggtgaggttagagaggtaatgagggagataaattgtgtgaagtttataaggttatggtaaggattttggttttgattttaagtgagatgggagttaagggaaggttgtagtagaggaaggaggttgaattatatgaattagttagttgattttttttttttaagttagtttggattagatttcgtttaaaagaattttaattgatataaagggttaaggaaggttttttttaagaatgaagaatgagaaggaatcgaagaatgtttaatggttaagtagtaggaaggttttttttataaaaaggataagaggtaataaagagttgtttgagaagtagtgaggttagagtgttagaaattgagtggggagggaaagtggtttaagataaggtttaagagataggaagaggttagattatatagggttttaatataataaggaatgtggattttattgtgttgttaatgtaggagttagtttgaggggtaaatgaaattaaatattgttggaaaagtagagagtaataagataggatgttaaattggaaaaaaaagtagtatgaatttatgtatatattaatattttttatatttttatttttagtttagaatttttttttgaatttgattagttttaatgatattttttaaaaatttattttagtgtttaataagtgttttatatttaataggttttagattaaatttttgatttttttttttaaatttattttttttttaatttttttattttagataatggtaattttatttttttagttgtttagttaaaaatttgggttttttttttttatattttatatttagttagttattttttttaaaattatgattgttttattgtaggtaatgtttttgatttttatgatatgttttttttatagtattgttaatatttgatatattatattatttatttgtttattgtttgttttttttgattagaatgttagttgtatgagggtagattttgtttttttttgttttttgttttatttttagggattagaatagtgtgtggtatagaggaggtatttaacgtatgttgaatgaataagtgattattttattaaaaggaatttgaggttggttgagtgtatgtttagggataggaaataaatgaagtatgggtgttgttgttagagagtaagaatatttttaagaatattttgggggtaatgtttaaagaatagaagaatgaatttgattagtttttaagggataattttaatattaaaaaagagaataaaattagttaatggtgtaagtttattttatgaaaatttatgagtttaatattttaaaagggagaaaaatatagagtttattaaatgttagttgtaatataaaagggatatgtttattattgttgatttatttttatttgttatgtgagaagtaaattattattgatttagtatgtaaggtagtgtgaatagttatatggttatgtttttttttttttttttgagatggagttttattgtgtcgtttaggttggagtgtagtggcgtgatttcggtttattgtaatttttatttttcgagtttaagcgatttttttgttttagttttttaagtagttgggattataggcgtttgttatcgttttcggttaattttttgtatttttagtagagacggggttttattattttggataggttggttttgaatttttgatttcgtgatttatttatttcggttttttaaagtgttgggattataggtgtgagttatcgcgttcggtcgttaggttgttttttttataattatatgtttatttatgagatgtggatgtgtatttttttttgtgttattaggaaagaatatagagattttattttttttattttttaaataaagaaatatattaagaataggaagaattgatatttttgattatataaaatgattagaaagttagtttaaagtatattttaagtaattaaatatttttaaaggatagttagttatatagatttaaatttttattttttagaaaaattaaatttttagatagttttattaattataataaagtagtaagatttaattatattttttattatattaatagattaggttagtatattaaaaagattaggtaagggggtaggtattgataatttaaatattttattttggggaagtacgtggagttttaaaatattaaaatttatttgataggtttaggaattttgtgatataataaggaaagtttttttatataaattagattttagttgggcgcggtagtttatatttgtaattttagtatttagggaggttgaggtgggtagattatttgaggtcggagtttgagattagtttggttaatatggtaaaattttgtttttattaaaaatataaaaattagtcgggagtggtggtgggtgtttgtagttttagttatttgggaggttgaggtaggagaattttttaagtttaggaggtagaggttgtagtgagttaagatcgtattattgtattttagtttgggcgataagagtaaaatttcgttttaaaaataaagtggatttggtttaaatgattattagtttagaattgtgttgattatgaaagtaggtcgtttaattaaattatttgttaattggtttgaatattaagaattagaaattttagtaggtttgaggtttttttgggtttattagtatttgttagttttttttatggttggaaaggtttgaaaagataaaaattattgaaattttaagggaggtaattttggaaaaaatgaatgtagaatagatataaatataaaatataattaataaagaagtttaaattaatggtatttatatttgtgagatgttgttaatttaagtgtattgtttagtgttttt

SEQ ID NO: 98 - DNA, 2240 bp, Artificial Sequence
  chemically treated genomic DNA (Homo sapiens)
attgaggattcggaaatgaggtttaagggtagttaaggatggttgtagttttatatgattagttgttaaagtaagttgaggtattgaagatggagaatttaaattttcgataagagttagaagataattttaattattttataaaattggaaattgaggtatttaatatgaaggaagtatttaaataattataaggaagtattgaagatgaagttatggttttttttggatagattgatttattagagcgttttaaagagtttaatttagatagtagtaatttttttggagtaaaattgcggttaaaaatgttttttcgtttttatggaagtcgggaaggatttgtattaagtcgttttggagagtgtagttttgtttttatgggtttatttttaagaagagggtttgtaaatggaagtagagaaagtattggatatttagaagaatttgagaaagagaggttattgttttttgttgattttgataaagaagaaaaggaaaaagattggtattacgtttaattttagaattttattaaaagaatagatagtttttttttaattgaaaatttttttttataaatagatatgattagaaggtaattggaatatgaagtaaggtaaattagagttgcgatggaagaataattaggtatttgttaggatatggaaaaacgagtatagcgaagaatagttagaatttagtaaatcgaaaaggatatatttcgtatacgatagtttttatagttttaagtaatagaagtagagaggttattttagaataagtatgaaatcggtttatatgatgttgagcggtagaatgaaggttaaggagtgggagaaattaatatggtaatttttggtaatggttagggtttaattatacgaatggattatgaaatagttagtgttttgagttttagtagtatatattttgtatttcgaaggttgataagttatttgggaattaaggtggaaatggtgtatttattgttgttaatgtttggtatttatgataaggatgatatgtcgcgaattttgttagttatgtttagtttttaagatagttgtatatttatgcgatagtttggatgtttttttttttttatttagtttttatatggtaatgataaagattttgtattgttgggaaattttcggggtagtaaagaggttcgggttagggttagtgtagtattttataatattatttatttatagtttgatgataagagaggtaggcgtgaaattcgagttttttattttttggaatagatacgcgtttattgtgaaatttgttgggagtggtaggaagtttatgaattaggtatggattaggataaaaatttaatgttagtttttgttgaatattagatttgttttgttgtgtgtgttttaatgaaatttttatttgatgaagagtatagatatgtaatgaatgaattagggggattataggttattgtagaattattgtaagtggattgtgaaatgtacgggtttattaatgattattatagtattatattaagacgatatgttggaatggttttgataaatttgatttttggagatgtagttaataaggttacgttatgttttatgaaaggttgtatgagagtatttgtggtttaattaaaatttgaaagtgaagatttatagtaggttattgtaagtgttttgaggaatttgttttggcgagtagatgtaaatagtaaaaagacgttgcgagaagttggaagtgtgaaagtattgatggaatgtgttttagaagttaaaaaggaattaatttttaaaagcgtattgagtgttttatggaatttgttagtatattgtattgagaataaagttgatatatgtgttgtagatggtgtatttgtatttttggttggtatttttatttatcggagttagataaatattttagttattattgaaagtggaggtgggatattacggaatgtgtttagtttgatagttataaatgaggattataggtaaattttaagagagaataattgtttataaattttattataatatttaaaattttatagtttgataatagttagtaatgtatgtggaattttgtggaattttttagtaagaaattttaaagattaggaagtattatgggatatgggggtagttagtatgtttaagaattttatttatttaaagtataaaatgattgttatgggaagtgttgtagttttaaggaattttatggtaaataggttt

SEQ ID NO: 99 - DNA, 2240 bp, Artificial Sequence
  chemically treated genomic DNA (Homo sapiens)
aggtttatttgttatgagattttttaaagttgtagtattttttatagtaattattttgtgttttgaatgaatgaggtttttgagtatgttaattgtttttatgttttataatgttttttggtttttaggattttttgttgagagattttataaagttttatatgtattattgattattgttaaattatgagattttaagtgttgtaataaagtttgtagatagttgtttttttttaggatttgtttgtggtttttatttgtagttattaagttggatatatttcgtaatattttatttttatttttaataatggttaaagtgtttgtttggtttcggtaagtaagagtgttaattaaaaatgtaagtgtattatttatagtatatatattagttttatttttagtgtaatgtgttgataaattttataaggtatttaatacgtttttgagggttgatttttttttaatttttaaagtatattttattaatgtttttatatttttaatttttcgtaacgtttttttattatttatatttgttcgttaagataaattttttaaaatatttgtaataatttgttgtaagtttttatttttagattttagttgggttataagtgtttttatgtagttttttatagagtatagcgtagttttgttggttatatttttaaaagttaagtttgttaaagttattttagtatatcgttttagtgtaatattgtagtggttattagtaagttcgtatattttatagtttatttgtaataattttgtaatggtttgtagtttttttagtttatttattgtatgtttatgttttttattaaatgaaagttttattagaatatatatagtaggatagatttgatgtttaataggagttggtattggatttttgttttggtttatgtttggtttatgagttttttgttatttttaataggttttatagtaagcgcgtatttgttttaaaagatgaaggattcggattttacgtttgttttttttgttattaggttgtgagtgaatgatgttgtggagtgttgtattggttttggttcgagtttttttattgtttcgggaattttttaataatatagagtttttgttattgttatgtaaaagttggatgaggagaggaagatatttagattgtcgtatggatatatagttgttttgggagttagatatagttagtaaagttcgcgatatattatttttattatgagtattaagtattgataataatgaatatattatttttattttggtttttagatgatttgttagttttcgaggtgtagagtgtgtgttattagaatttaaaatattggttgttttatggtttattcgtgtagttgaattttgattattattagaagttgttatgttgattttttttattttttgatttttattttgtcgtttagtattatgtgagtcggttttatgtttgttttgagatgatttttttgtttttgttgtttgggattgtaaaagttgtcgtatacgaagtatgtttttttcgatttgttgaattttggttatttttcgttgtgttcgtttttttatattttggtaggtatttagttgtttttttatcgtaattttgatttgttttgttttatattttaattgttttttggttatatttgtttgtaaggaaaaatttttagttaaaggaagattatttatttttttagtgagattttgaagttgagcgtaatattagttttttttttttttttttttgttaagattagtaagaagtaatgattttttttttttaagtttttttaaatatttagtattttttttgtttttatttataaattttttttttggaaatgaatttataggaataggattgtattttttagaacggtttgatatagatttttttcggtttttataagaacggagggatatttttgatcgtagttttattttagggaaattattgttatttaagttaagttttttaagacgttttaataaattaatttgtttagaagaagttatagttttatttttaatatttttttgtagttgtttaagtattttttttatattagatgttttagtttttagttttgtaagatgattggaattattttttagtttttgtcgaagatttgagttttttatttttagtgttttaatttgttttaataattgattatatgaagttgtagttatttttggttatttttggattttattttcgagtttttaat

SEQ ID NO: 100 - DNA, 8169 bp, Artificial Sequence
  chemically treated genomic DNA (Homo sapiens)
  unsure (2047, 2136, 7481, 7492, 7502..7503, 7505, 7511): unknown base
ggaattatatggtttttagtaatagtatgttgttatttattatagtaattttttttggttatatggaaaaatttagatatattaagaaaagttaagagtataaaattaagttatattggagaaaaacgttgtttttttacgtttttaagataaatattttaatgttaggttaaaatagtaatgttagaattaaaaaaagttaaagaggagaataattattttaggttttttttaggggagaaaaaaatgaaggaaatgatatattgatttgtaaattatgtatagtaagaaattgtaaaagatgaatttttgtaatatgaatttgagaaataaaaaaaaaaaaaataattgtattttaaggaatgaaattattattttaaattaagaagataatatttttaatttaaaattaggaaaattaaatagatgttaaggagaagatatttgtttaaaaatagagtataaatttaaaaattaaaattttttaaaattttattaaaattagataatattttaagaaattttgttgttttaaatataaggaattagattttggttttgtattagtgtttgttttttggttttttatttgagaacgtttaatttttagaaaaatatataaataatttgtttttaattttagttaagttaataatatataaaattttttttattagtttattttttattagttttttttaattttagattttttatttttttaatttttattttttagttttataatttttttttttttaaaaatgtgggataattaattattttattttatttgattatgatatagatatttattttgtatatatgatttaatataaaattttaagattttaaattatatgagtttatttataaatatttattttatttatagttaatttattttttaataattatatttatattttttataaaaattgagatattagatggagttggttattattttaagtttttttaaattaaataattatatagtttgttaatatgaggtgtttatttatataagagttataaagttaaatatatgggtatttgtagataatttagaaaatataatttttgtttttttttttagaggtaaaggtttattttgttgtttaggttagagtgtagtggtgtgattatagtttattttagttttgaattttgggtttaagggattttttttttttagttttaagagtagttgggattataggtatatgtttggttaatttttaaatttttttatggagattgggttttgttatgttatttaggttgattttaaatttttgggtttaagtgatttttttattttggtttttttaagttttggtattgtaggtgggagttattatttagttatagttgtttttgttaaataatattaaattaattttatttattaaagaattgtataaatatatattattttgttttaggtttggtttatagttttatgattttaatagtataggtaaatataaaattgattagtgttggtgtttagaaattgatatgttaaaatatggtatttgatacgttaaattaaagaagttttaaggtttttttgattttttttttaattttattattttttttaaagaagttgaagtttttttatttgtttaataattagatttattaaggagagtaattgttggtttttttttttttgttattttatttgttaaagaaaagaagattaaaatgtaattatatttaagtagatttttatagaagtataatgattgtttttaaggattatttaaattttaaagaaaattatttataagttaatatttgttgtttaatttaattatttttttattaattatttattgttttttaataaattttttttttttttttataatttgttttattagaatttaagttttttattttttttgtaattttaagattagtgtataaatttttataatttattgagttaggatttttagtaattttggggggcgagagtatagttttaatatagtaatatagtaaaatatttatgatatgtagaagacgtttntatttattttattattaatataaatttattattttttaaagaattgagttatatgatttaaaaaaatagggttaattattatgttttgntgtggtgtttatttatttaaattaattagattaatattttttaagggattgtggtttattatattgaattttattatgtagatataatatataatataatatatgtatatatgtgtaaatatatttaaataaatatatatataaaggttttttagtttttattttagaattttagttgtgagatagtaaaatatataaatttgttggtttatagagaatagttggatttaaattatttttttggtaaaatgagataaaggttatgaattaaattttggtaaaatagtttgagttaattattagtgtagggattaaagggaaattttagtgaaggtttattgaaaaattaatttgtaaaaggtagattaattggagaaaaagtatataaatgtatttaatatgtatatatgggagtttgtagaatgatgatttaagtatatagaggaaattgtttatttttaatttaggattaataaaatatagatagttatgtagaaatatgattggatagaaagagtatgagttaatgttaataaaatgagtggggaaatttagtgaaaaaagttaaattttgtaaaatatttagaggtttattttgagttaaatatgagtgattacggtttgtgatatagtattaggaggttttgagaatatgtgtttaaggtgtttggattatagtttttttttatatattttaggaagatagaagatataggtaaaaatattagttaatatatgtaaggtatatattggtttgatttggaaagtcggtatattttggaggaggaggggtttggttagtggtggtaggagggaggttgtggaagttagggtttttgttatatatgtgaagtttgtaatatgttttagaaagaatagatggtatatgtattttaaaaggtaaatgattttaaacggtgttagatttttagttaaatttttttcggattagagaaagatttggaaagggaaggagattgtttatagaatataaatttttttcgtaaaagatagttttgtataggattattttaaaatatgttagaaatatattttggggtaaaatattttgatcgtttttagggttgttatttgttatgtgatgttatgattagaattaggttggaatttgttttgagataggtttttattttgttgtttagtttggagtatagtgtttttgattacggtttattgtagtttcgattttttttgatgtgggaggtttaagtgatttttttatattagttttttaaatagttgggattataggcggttattattatattgggttaaatttttttaaagtagagataagttttttttatgttgtttaggttggtttttaatttttggttttaatttttttattttttaggattataggcgttaggttagattttataggtttttagatttttacgtattaggtatttggtagggggagggattatagtggtagaagagtagtattagtggtttatattatatattttggttttagttggttggggtatataaaattaggtgttatcgttaacgattaggtttatagggtattgttgttaaaatttgttgttaataatttttatatattttttaaaacgttcggtaggcggtggtgcgtatttttaatgtattcgtcgttagttttataggtaagggagaaagaagttagacggagttcggagatgtggagggtagacgtaggcgtatttggaaaagggattggcggtgggaggcgtagagggaaaaaggaacgatataatcgggttttttagtcgttggcgaagttcgatggggcgttttgcgagggttcggcgagggttttgttaggatagtagtagtgcgtttaaggagtgagaggtattcggggttattggagttagatttttaattcgttttagtgggaggcgaagaataacgaaagtttcgtatttttatttttttaatggttaatgatattaaaggtttttatatggttatttgttatttgtatatttttagtgaaatgtttgtttatgttttttgattattttttaattggatttttaaaaataattgatttttgagttatttatatattttagatattggttgtatgttagatatatggtttgtaaatatttttttttaggtaaatttttttagtatcgttatagggttttttataaagtaaaagttttaaatttatggagtttaatttattaatatttttttttatcggttttgttattaatgttaatttaagaattttttgtttagttttagataatagtttgttgttttttaaaatcgttttgtaattttattcgttatagttatatttagttatttaatttttatgtaagggttatttttggcgggggggaatttatagatgttttgtttttttagtattatttgtggaaaagattatttgttttgtattaaattgtttttggattttcgtttaaaattagttggatcggtttttgttggtaaagttttgtttgaagtttattttaataggtgagaaaaagtttatagtttaatagtttttttttaatttgtaatttcgttttgaatttttggattagtttttcgattgttgtagatgttaagcggatttcgcgtcgttttgcgttgggttagttttttacggttggttttttattacgtattgcgtaagcggaatttatgtttgttatttatattttttgcgttttcgtatttcgtttttgtgcgtaagtcggaatataaaatcgcggaggagtgagtttttggggtgtttagttggttgtcgcggtagttttttcgagtagcgtatttgttttttaggttgtttggttcgtgttttcgagaaaggtaagtttttttttcgtttttttaggggtatttgaaaataataagtgttagataaagtagtagatgttgttgcgtagtagaagtttatgggcgagttgtttttgaaattggaattaggttttttttggcgcgattacgtaagaattattcgtagttttgcgtttttggtaggttttgtaattgtattttggatagtttcgttgggaagttagtattttttaatatagaagaacgaggtttgataagtgtgcgagtttaaaggttgatatagtgtttattattatagttgcgtaggtagttagtgtttaggaagtaatagtggagttatgtagtgtgaaagtaagattgaaatgggcgaggagggtagtagtcgttatagttattagagagaaatttgattttgtaggtgcgtggtgatgtttatgagttaggttggtgtcgtaatagtagcggcgggattttgagtttcgtacggtcgttgggtttggacgttttttggtttttggaaatttttattttttttttagtttgaggttaggtggtttgggaaggtggaaggagtgtggaggggagtggggggggggggggtttattgtttgagaatgagaattttttttatatttggaaattttagttattacgtgtgttttttattaatttttttttttttattttttttttgatagagacggcggtttttttatgttatttaggttagttttgaatttttgtgtttaagcgatttttttattttgattttttaaagtgttggaattataggtatgagttaatgcgttcggttgttttattaattttttatgaatgaatttgtatatatattttttagagtaggaagtaatgtaaaatagaataattagtaatgtatattttttaatgtgggatgttggtggttaagagatatttggtttttattggaatttttgatattaatatggagtttataatagttgtggagagtgtagataaggttaggatttttgtgattagagaatttttagtgcgtgaagatttaaggaaagttggattgttgatttttgttaataaataagatgtgaaagattgtattattgtagtagaaattttttagttttttaagttaaattttattaaaggttattattgttaaaggaattgtgtttaggatttggatagttgatgttattatttaatattagatgatattaattaattatattttatagattggaataaagtgttagattttatttgaaagttgtaaaaatgaatggtttagatatatgtatgtatttattttatattaatttttttatttattgtattaatttttttggttttttttaattaagaatataaaattatttatttaaattttgttatttaagtttagaatatttttagaattatattattttaaagaagttagattagaattagaagtaagttaagtttgaagatataataattagtaataatattttttttttttaaatgaaaattttaatatggggtgggtatgttgtgttatatttgtaattttaatattttgggaggttgatgtaggaggattatttgaatataggagtttaagattagtttggataatatagtaaaattttgtttttataaaaaataagaaaattagttgggtatggtgttatatgtttgtagttttagttattcgggaggttgaggtgagaggattgattgattttaggaggttgaggttgtagtgagttatgatcgtatgattgtattttaatttgagggatagagtaagattttgatttaaaaaaaaaaaataaaaaaaaaaaaattattattaaaattttaatatggatatattatttttttatgggatttgtatattttaaaaagggtttttttttttagtattgggagagtatgtgtttaattacgtagttagtaagataggttagtttatatagggagtgtgttatttataaaaagttttttttttttttttggtattgtatatgatataattatagttgtatttgaagagaagtgtattttaaggattattattatttagaaatatgtataaatttttatatttagtgttataggaatgatattgttttgtattatttttatttttgtttagaggttagttatgtggtttgtttgtatggtgtttagaattttttttatttgatttaggatgtttttgaagtagtttttttgggtagttgtttggtatttaggatatatttgtgagaaaagttttttataaatttaatttattatgtttatttttgaatttaaaaagtttattgattgtttaaattttgaaattttttttatttttataaggttgaattaaaagtattttgttaaaggtagtagttatggtaaaagaaaaattattgttttgtagaaaaatttatttaatatttataattttttttaattagagattagattttgaagagaaaggtttatatatatatatatatatatatatatatatatanttttgtttttnttttttgttnntntttttntatttattgttattgtgattaaggatttatgaattaagattttttttttagtttttggtggtatatggtgatagtatgtttagagtaaaggtgttttttatgttttttttggggttgtattgattgtaggtattttttttttttatattttatattattgatattaaaaattttttttttttttttgtattgatgattttgtagttttaattagggcggcggtgttattttaaatgttattttggtatttagttttatagagtggggaaaatttttttatttgtttttttttgattgtttagttttttttaattaaaattttaattttataagcgaggaaatgagagtgttttttgtaggggtgtagtgagaatttaataaaatagtttaaggaaagaaaataaaaggtagtattgttgtattttttagatggtaaaaagtaaattattatgtttgtttaatatatattatttgttggtttttcggtttagtaggttgaattgtgtgtttgggaatttttttttcgttgtgtgtatttttttacgttatagggtggattttttttagagttttagtggagtagttggttaggttgatatgatttgataatattgtaggttattattattattttttatcgttttattttttttttagg

SEQ ID NO: 101 - DNA, 8169 bp, Artificial Sequence
  chemically treated genomic DNA (Homo sapiens)
  unsure (659, 665, 667..668, 678, 689, 6034, 6123): unknown base
tttaggaagaaagtgagacggtgagagatggtagtggtaatttataatgttgttagattatgttagtttggttagttgttttattaggattttgaagagagtttattttgtgacgtaaaggggtgtatatagcgagaagaaaatttttaggtatatagtttagtttgttagatcgagggattagtaggtgatatatattaaatagatatggtggtttgttttttattatttagaaagtgtagtaatattattttttgttttttttttttaaattgttttattaaatttttattatatttttataagaaatatttttattttttcgtttgtaaaattaagattttaattgaagaggattgaatagttaaagagaaataggtgagggaattttttttattttatggggttgaatgttaaggtgatatttagagtgatatcgtcgttttggttaaagttatagagttattagtataggagaaaggagggggtttttggtattagtggtgtgggatgtagagaggggaggtatttgtagttagtgtagttttagaagaggtatggggagtatttttgttttgagtatgttgttattatgtgttattaagagttgagggaggggttttagtttatgaatttttagttataatgatagtgggtgngaaaanannaataaaaagnaaaaataagantatatatatatatatatatatatatatatatatgaatttttttttttaggatttaatttttgattagaaaagattgtaaatattgaatgagtttttttatagaatagtggttttttttttgttatggttattatttttaataaagtatttttaatttagttttatggaaatagagaaaattttaggatttgaatagttaatgaattttttgagtttaggaataaatatagtagattaggtttgtaagaaattttttttataggtatattttaaatattagatagttgtttagggggattgttttagaagtattttaggttagatggaaaaagttttaggtattatgtagatagattatatagttggtttttggatagaggtaggaatagtataaggtaatgttatttttgtggtattaggtatagaaatttatatatgtttttaggtgatgatggtttttaaaatgtatttttttttaggtatagttatgattgtgttatgtataatattagaaagagaagagaggttttttgtgaatagtatattttttatataaattagtttgttttgttggttgcgtagttgaatatatatttttttagtattggggaaaaggattttttttagaatgtgtaagttttatgagagagtaatatgtttatattagagttttggtggtggtttttttttttttgttttttttttttgagttagggttttgttttgttttttaggttggagtgtagttatgcgattatgatttattgtagttttaattttttgggattaattaatttttttattttagtttttcgagtagttgggattataggtatgtgatattatgtttagttaatttttttattttttgtagggatagggttttgttatgttgtttaggttggttttgaatttttgtgtttaagtgatttttttgtattagttttttaaagtgttgggattataggtgtgatataatatatttattttatattagagtttttatttgaaaaaaaaaaatgttgttgttggttgttatatttttagatttaatttgtttttaattttagtttggtttttttaagatagtgtgattttaagagtgttttaaatttaagtggtaaaatttaagtagatgattttatatttttgattaaagggggttagggaggttaatatagtaaatggggaaattgatataaaataaatatatatatatatttaaattatttatttttgtagtttttaggtaaaatttagtattttattttagtttatgagatgtggttagttgatattatttaatattaaataatgatattagttatttaaattttgggtataatttttttagtaatgatgatttttaatagaatttagtttaaaaaattaggagatttttgttatagtgatgtaattttttatattttatttattaataaaaattaataatttagttttttttaggtttttacgtattaagagttttttagttatagaaattttagttttgtttgtattttttataattattataaattttatgttagtattaagagttttagtaaagattaaatattttttggttattaatattttatattaggaaatgtgtattattaattattttgttttatattattttttgttttaggggatgtatgtataaatttatttatagaaaattggtaaagtagtcgggcgtattggtttatgtttgtaattttagtattttgggaagttaaggtgggaggatcgtttaagtataggagtttaagattagtttgggtaatatagggagatcgtcgtttttattaaaaagaaaataaaagaaaaaaaattggtaaaggatatacgtgataattgaagtttttagatgtgaagagaatttttatttttaggtagtggattttttttttttttatttttttttatattttttttatttttttaggttatttggttttaggttgagggggaggtgaaagtttttaggaattagagggcgtttaaatttagcggtcgtgcggagtttaaggtttcgtcgttgttgttgcggtattagtttggtttatggatattattacgtatttgtaaggttaggtttttttttggtggttgtggcggttgttatttttttcgtttattttaattttatttttatattatatgattttattattattttttgaatattagttatttacgtagttgtaatagtggatattgtgttaatttttaagttcgtatatttattaaatttcgtttttttatattaaaaagtgttagttttttaacgggattatttaaagtgtagttgtaggatttgttaggagcgtagggttgcgggtggtttttgcgtaatcgcgttaagaaagatttggttttagttttagggataattcgtttataaatttttattgcgtaatagtatttgttgttttgtttggtatttgttgtttttaagtatttttaaaaaagcgaaagaaagatttatttttttcggaggtacgaattaagtagtttagaagataaatgcgttgttcggagagattgtcgcggtaattaattggatattttaagagtttattttttcgcggttttatatttcgatttgcgtataggagcggggtgcgggggcgtagggagtgtgggtaataggtatagatttcgtttgcgtaatacgtggtaagaaattagtcgtgaggggttggtttaacgtagagcggcgcgaggttcgtttggtatttataataatcgaggggttagtttagaagtttaaggcggggttataggttggggaggaattgttaaattgtggatttttttttatttgttggaataagttttaggtaaaattttgttaataaaaatcggtttaattgattttagacgaaagtttaaaagtagtttaatgtaggatagataattttttttataaatgatattgaaaagataggatatttatagattttttttcgttaaaaataatttttatataaaaattaagtggttagatataattgtgacgagtaaaattataaaacggttttaaaaaataataaattattgtttaaggttaggtaaaaggtttttaaattgatattagtggtaagatcggtaaaaagaaatgttgatgaattagattttataaatttaaaatttttgttttgtgaaagattttgtaacgatattgaaaaggtttatttaggagaaaatatttataagttatatatttggtatataattagtatttagaatatgtaaataatttaaaaattaattatttttaaaaatttaattagaaaatagttagaagatataaatagatattttattgaagatatgtagatggtaaataattatatgaaaatttttaatgttattagttattagagaaatgggaatacgaggttttcgttgtttttcgttttttattagggcgggttgagggtttggttttagtagtttcgggtgttttttattttttgggcgtattgttattattttggtagaattttcgtcgaattttcgtaggacgttttatcgagtttcgttagcggttaggaagttcgattgtgtcgtttttttttttttttgcgttttttatcgttagttttttttttaaatgcgtttgcgtttgttttttatattttcgagtttcgtttggttttttttttttttgtttgtgaagttggcggcggatgtattgaaagtgcgtattatcgtttatcgagcgttttggggagtgtgtggaagttgttggtagtaggttttgatagtagtattttatgggtttagtcgttgacggtagtatttggttttgtgtgttttagttagttgaggttagggtgtgtggtgtgggttattggtattgtttttttgttattataatttttttttttattaggtatttggtgcgtagaagtttaaagatttgtgaggtttagtttggcgtttgtaattttagagaataaggaggttgaggttaggagttagagattagtttgggtaatatggggagaatttgtttttattttaaaaaaatttagtttagtgtggtggtggtcgtttgtagttttagttatttgggaggttgatgtgggaggattatttgagttttttatattaagggagatcgaggttgtagtgagtcgtgattagaggtattgtattttaagttgagtagtaaagtgagaatttgttttaaaataaattttaatttgattttggttatagtattatatgataggtagtagttttaagggcgattaaagtattttattttaaaatatatttttgatatattttggaatggttttgtgtaaagttattttttgcgagggaaatttgtgttttgtggataatttttttttttttttaggtttttttttgattcgggagagatttaattaagagtttgatatcgtttaaggttatttattttttgaggtatatatgttatttattttttttgaagtatattataggttttatatatgtaataagaattttggtttttataattttttttttgttattattggttaaatttttttttttttaaaatgtatcggttttttaggttaaattaatgtatattttatatatattgattgatgtttttgtttgtattttttgtttttttaaaatgtataaaagaaaattatagtttaaatattttggatatatgtttttaggattttttgatgttgtgttataggtcgtggttatttatatttggtttagaataaatttttaaatattttatagagtttggttttttttattgggtttttttatttattttattggtattagtttatattttttttgtttaattatatttttatatggttgtttatattttattaattttaagttaaaaatagataattttttttatatgtttgggttattattttgtaggtttttatgtatatatattaaatatatttgtatgttttttttttaattaatttgttttttgtaggttgattttttagtgagtttttattgaagtttttttttggtttttgtattggtaattaatttaaattgttttattaaaatttgatttatagtttttattttattttattagaaaaataatttggatttaattgttttttataaattagtaagtttatatgttttattattttataattaaaattttaaaataaaagttagaagatttttatgtgtatatttgtttaaatatatttatatatatgtatatgtattatgttgtatgttatgtttatataataagatttagtgtggtaggttataattttttaagaaatgttaatttgattggtttaaatagatgggtattatantaaaatatagtaattaattttatttttttaggttatgtgatttaattttttaaaaagtaatgggtttatattggtgataaaataaatanaaacgttttttatatgttataaatattttgttgtgttattgtgttggggttatgttttcgttttttaagattgttggaaattttgatttaatgagttatagaagtttatatattagttttgaaattatagaaagaatggggggtttggattttggtaaaatagattatgggaggagaagaggaatttattgaggggtaatgaatgattggtgagagaatgattggattgagtaatagatattaatttgtaaatagttttttttggaatttaaataatttttggaggtagttattgtatttttataaaggtttgtttgggtgtggttatattttggtttttttttttttaatagatgagataataggaggaggagaattaataattgttttttttggtgggtttggttgttaggtagataaaggaattttagtttttttgggaaggatggtggggttggaggaaaagttagagagattttgaggtttttttagtttagcgtgttaaatattatgttttggtatattagtttttgagtattagtattggttagttttatatttgtttgtgttattaaggttatgaagttataaattaggtttaaagtaaagtgatatatatttatgtaattttttgataaataagattaatttaatattatttaataaaaatagttgtggttgggtagtgatttttatttgtaatgttaaaatttggagaggttaaggtgggaggattatttgagtttaggagtttgagattagtttgggtaatataataagatttaatttttataaaaaaatttaaaaattagttaggtatgtgtttgtgattttagttatttttaaggttgaggaggggggattttttgagtttagagtttaaggttagagtgagttatgattatattattgtattttagtttgggtaatagagtgagtttttgtttttaaggaaaaaaataaaagttgtattttttgagttatttatagatatttatgtatttaattttatggtttttatgtgggtaaatattttatgttaataggttatataattatttaatttaaaaaaatttgaaataatgattagttttatttaatattttaatttttgtaagaaatataggtataattgttaaaaaataaattaattgtaaatgaaataaatgtttataaatgaatttatgtaatttaaagttttaaaattttatgttaaattatatatataaaataaatgtttgtattatagttagataagataaaatgattggttattttatatttttaaaaaaagaaaaattataggattaagaggtaggggttaggaaaataaaaggtttaaagttgaagaggattaataaaggatgagttaataaaagaagttttatgtgttattgatttggttggaattaaaaataaattgtttgtgtgtttttttaaaaattaaacgtttttaggtaggggattaggggataggtattgatatagaattagagtttggttttttatatttaaaataataagattttttgaagtattatttgattttaataaaattttaaggggttttgatttttaaatttatattttgtttttaaataggtattttttttttgatatttatttaatttttttagttttgggttaaaaatgttgtttttttgatttaaagtggtaattttattttttgaggtatagttgttttttttttttttattttttaaatttatattgtagaagtttattttttatagttttttgttgtatatgatttgtaggttaatatgttattttttttattttttttttttttggagaaggtttgagatgattatttttttttttggttttttttggttttaatattgttgttttggtttgatattagaatatttattttgaaggcgtagaaaagtagcgtttttttttagtataatttaattttgtgtttttggttttttttgatatgtttgaatttttttatataattagaaaaagttattgtggtaagtaatagtatgttgttattaagaattatgtagtttt

SEQ ID NO: 102 - DNA, 2501 bp, Artificial Sequence
  chemically treated genomic DNA (Homo sapiens)
ttatacggttagaaagggtttaggcggttttcggcgtttttttagtttttgtttttatggcgtattttttcgttagtcgttttttttcgtatttcgtcgttcgttcggttcggtcgcgtgcggtttttcgggagtttttatttcgtcgcggattttagcgattattaagttcgtacgcggtttgtcgtaggtttgagtagaaggtttcgcgtatatttatcgcgtcgcggtcgcgcgggaggtttgtgtcgttcgcgttatttattggtcgggtttcgcgggcgtagcggagcgggcgggtggtcggttcggacgcgtttttttcggtcgcggtttcgcgcgttatgtgttttcggcgggacgcgttattttcgggtttgtcgcggcgtttttaattcgggttagggagcggggcggagggggcggtcgggtggtttagaggagggtttttttttttttttttttttgaatgaatcgtgtgacgttacgtataggaaatcggtcgggttgtgtagagaatgaagtaagaggataggtattatagtttcgttttcgttttttttttttcgcgttcgttttttcgcgtcgtttgttcgttcgttcgtcgcgttttcgttcgtcgtttttcgtggtttcgtcgcgttgtcgtcgtcgtcgttgttagtagaaggtgtcggggtttcgggttttttttgtcggcggtcgttagcgttcggagcgggttgcgcggcgggagtttcgggaggcggtcgtagttagcgtcgtcgcgtaggattaggaggaggagaaagggtgcgtagttcggaggcggggtgcgtcggtggggtgtagcggaagagggggtttaggggggagaatttcgtagtagttattttttttaggaaaagagggaaaaaataaaatttttttttattatttttttttttttatttttcgtcgtattatatatagcgcgggtttttagcgttcggtatcggcgggttaggcgcgttttgtttttatttatttagtagtttttcggaaaatgtatttgttgttcggagtttaattagaagaggatttttgttttcgttttcggtttttttatcgtttttttttttttgttttttttttggggaggcgtgaagcggtttcgtggatagagatttatgtttgtgttcgcgcgtgtgtgcgcgcgtgtaaattgtcgagaaggggaaaatattataggatttttgcgaatatcggattgaaaattgtaatttatttgtcgtcgtcgttgttttttttttttttcgagtttttgagattttcggttgggatttttgcggattgatatttttgtgaagtagaagtttgggaatcgatttggaaatttttttaatttttatttttttttttcgcgatttttgatttattgggaagttttaaattagttataattggagagtgttgaagattgatgggatcgttgttttatgtatttgttttggttttataaaaaggaaatttgatagaggattatgttgtatttaaaaaatataagtaagttttttgtataggaaattggtttaatgtaatttttaatggaaatttttgagattttttatttaaagtgtattcgagtaaatttaatttttaggtagtttaatatattttttttagtcgtgttatttgtagtgtgtatgttttgtttttatttagtgtgtatagggaaacgtatttgattttttatttattagtttgttttttttttaattttttagtattatagaggaagtagattgatattaataatatttattaataataacgtgttttatgaaataaagattcgaaaggaattggaataaaaattttttgtattttatgttaagggggaaatattagaattaagtgtttcgcgtgattgaagatattttttcgtttaagaatgtaaagtatatttaataaaatagttggattataattttttttttttttttgggggtcgtggggtgggagttggggcgagaggtgtcgttggttttcgttgttttttttttgggaaggatggcgtacgttgggagaatagggtacgataatcgggagatagtgatgaagtatatttattataagttgtcgtagaggggttacgagtgggatgcgggagatgtgggcgtcgcgttttcgggggtcgttttcgtatcgggtattttttttttttagttcgggtatacgttttatttagtcgtatttcgggattcggtcgttaggatttcgtcgttgtagatttcggttgttttcggcgtcgtcgcggggtttgcgtttagttcggtgttatttgtggtttatttgatttttcgttaggtcggcgacgatttttttcgtcgttatcgtcgcgatttcgtcgagatgtttagttagttgtatttgacgttttttatcgcgcggggacgttttgttacggtggtggaggagttttttagggacggggtgaattgggggaggattgtggttttttttgagttcggtggggttat

SEQ ID NO: 103 - DNA, 2501 bp, Artificial Sequence
  chemically treated genomic DNA (Homo sapiens)
atgattttatcgaatttaaagaaggttataatttttttttagtttatttcgtttttgaagagtttttttattatcgtggtaaagcgttttcgcgcggtgaagggcgttaggtgtagttggttggatatttcggcgaagtcgcggcggtagcggcgggagaagtcgtcgtcggtttggcggagggttaggtggattataggtggtatcgggttgagcgtaggtttcgcggcggcgtcgggggtagtcggggtttgtagcggcgaggttttggcgatcgggtttcgggatgcggttggatggggcgtgtgttcgggttgggaggagaagatgttcggtgcgggggcggttttcgggggcgcggcgtttatatttttcgtattttattcgtagtttttttgcgatagtttataatggatgtattttattattatttttcggttatcgtattttgtttttttagcgtgcgttattttttttagaggaaaagtaacgggggttaacggtatttttcgttttagtttttattttacggtttttagagaaagaagaggagttataatttagttattttattggatgtgttttgtatttttggacgagggggtgtttttaattacgcggaatatttgattttggtgttttttttttggtatgagatgtaggaaatttttattttaatttttttcggatttttattttatgaggtacgttattattagtaagtattgttaatattagtttattttttttgtgatgttgaaaggttaaagaaaaaataaattaataagtaaaaaattaggtgcgtttttttgtatatattgagtgaaagtagggtatatatattataagtaatacggttaaaaagaatgtattaagttgtttggaaattaaatttattcgaatgtattttaagtaaaaaattttaaaggtttttattgaaagttatattaaattaattttttgtgtagagaatttatttgtattttttaagtatagtatgattttttgttaagttttttttttgtaaaattaaaataaatgtataaggtaacgattttattaatttttagtattttttagttatagttgatttgaaattttttaatgaattaggagtcgcggggagagggagtaaaaattaggaggatttttagatcgatttttagatttttgttttatagaaatgttaattcgtaggaattttaatcggagattttaagagttcgagaaaaaaaaaaggtagcggcggcggtagatgaattataatttttagttcggtattcgtagaagttttgtgatgttttttttttttcggtaatttatacgcgcgtatatacgcgcgggtataggtatgaatttttatttacgggatcgttttacgtttttttaggagagagataggggagaggggacgatgaaggagtcggggacggaggtaggaatttttttttgattaaatttcgaatagtaaatgtatttttcgaaaagttgttggataaatgaaggtaggacgcgtttggttcgtcggtgtcgagcgttagaagttcgcgttgtgtgtggtgcggcgaggggtggggagaaggaggtggtgggggagggttttattttttttttttttttttaaaaaggatgattgttacgaagtttttttttttggattttttttttcgttgtattttatcggcgtatttcgttttcgggttgcgtatttttttttttttttttggttttgcgcggcggcgttggttacggtcgtttttcggagttttcgtcgcgtagttcgtttcgagcgttgacggtcgtcggtagggagggttcggagtttcggtattttttgttggtagcggcggcggcggtagcgcggcggggttacggagagcggcgggcgggagcgcggcgggcgggcgggtaggcggcgcggaggggcgggcgcgggaggaagggggcgggagcggggttgtggtgtttgtttttttattttattttttgtatagttcgatcggttttttgtgcgtaacgttatacggtttatttaaaaaaagaagaaagaaagagtttttttttgagttattcgatcgtttttttcgtttcgttttttggttcgggttaaaggcgtcgcggtaggttcgggagtggcgcgtttcgtcgggggtatatggcgcgcggggtcgcggtcggggagggcgcgttcgggtcggttattcgttcgtttcgttgcgttcgcggggttcggttagtgggtggcgcgggcggtataggtttttcgcgcggtcgcggcgcggtgggtgtgcgcggggttttttgtttaggtttgcggtaggtcgcgtgcggatttggtggtcgttggggttcgcgacggggtgggggttttcggggaatcgtacgcggtcgggtcgggcggacgacggagtgcggaggggggcggttggcgggagggtgcgttatgaaaataagggttggaaaagcgtcgggaatcgtttggattttttttggtcgtgtga

SEQ ID NO: 104 - DNA, 6277 bp, Artificial Sequence
  chemically treated genomic DNA (Homo sapiens)
gtgcgttaagattatgttattgtattttcgtttgggtgatagagcgagattttgttttaaaaataaaataaaaaattggttcggtgtggtggtttatgtttgtaattttagtaatttgggaggttgaggtggaaggatcgtgaatttaggagttgaagattagtttgggtaataaagtcggattttgtttttttaaaaaaattaagtttaattaaatatttttaaaaataataaattagttattagaattataaatttgtattgtttttgataatgtaatgtattgttttgtaaaatattataattaagattgttattttaaggattttgaagtttgtgaagattaggtatttttttgaaattttaagataattattttttagttttttttattttttgtttttatttagaattaagtttattattaaaacgtagttttgttgacgttaagtatttatttatatgatatgtaattattggggtcgttaaaatttgggtagaatttttgttaatttattaggattttaggtaaaaaattaggaaaatgaagtgattgatttagtttgttaaaagcggatattttgaaatattattttttaattttaagaaatattttttgttaggtgcggtggtttacgtttataattttagtattttgggaggtcgaggaaggtagattacgaggttaggagatcgaggttattttggttaacgcggtgaaatttttatttttattaaaaatataaaaaattagttgggcgtgatggcgggtgtttgtagttttagttattcgggaggttgaggtaagagaatggcgtgaattcgggagatagagttcgtagtgtattagtcgcgatcgtgttattgtattttaggttgggcgatagagcgagatttagttttaaaaaaaaaagaaaaaaaagaaatatatttttttattcgttagggaaattaattttcgttttttttttttaaattatataattggaaattaatttagatattttggagtttttttagttggtgggttaattaagagaaaataggaagtgggagattttagtttagttggattatatttaggtttttataaggaattttttttggttggtatgtaaaaaaatttttttagtaagagtattaattttgaacgtgtgtaaatacgaaagttatggttaattttatttgttttttaggtttatagttagtagagttagatagttgggttttaggtttttagtttttataattgatattattgttaagtttatgtgattgatttattttgttttggtataagttagttttttttttatatcgattttttttttttttagttttaataaaatttttttaatgaaataaatttggtaattcgaattttggttattgtttttattagaggtttgtataagttaagttatttaagttgaggtcgggagtggtggtttatgtttgtaattttagtattttgggaggttaaggtaggaggatcgtttgagtttaggagtttaagattagtttgggttggtttttgagaaagcgagattttgtttcgaaaaaaaaaaaaaaaagtgtggtttgaaagttgagtgtttgataaaaaggagaaatagtgtttttttaaaattaaaggtttttaattaagatttttttaacggggtttcgaaaaaaggagaatgggatgagaaggatatatgggtagtgttattttttaatttgtagattttattttagttttttagttatcgttttttagtattttatgtttttaagatagtgttattattttaaggatttttttttattttttttgtttgggttttttttttattgaggagtcgtggttttttattagtagaagtcggatgtttttgtgttcgaaattggtgggtttttggttttattgattttaagaatgaagttgcggatttttacggtgagtggtatagtttttaaagatgatgtgtttagagtttgttttttttgatgttcggacgtgtttagagttatttttttttggtggattcgtggtttcgttggttttaggagtgaagttgtagatttttgcggtgagtgttatagtttttaaggcggtatgtttggagtttgttcgtttttttcgtttggagttgtttattttttttggtgggttcgtggtttcgttggttttaggagtgaagttgtagatttttgcggtcggtgttattagtagataaatgttatgcggatttaaagagtgagtagtagtaagatttattgtaaagagtataagaataaagtttttatagcgtggaaggagattagagcgggttgttgttgttggtttaggtagtttgtatttttttttttttttttttttttttttgagatggagtttttttttgttatttaggttggaatgtagtggtgtaatttgggtttattgtaagtttcgtttttcgggtttacgttatttttttgttttaatttttttagtagaggggattataggtatttattatcgtatttagttaatattttgtttttttagtagagtcggggttttattgtgttagttaggatggtttcgattttttgatttcgtgatttatttttttaggttttttaaattgttgggattataggtgtgagttattggtatttagcggggtagtttgtttttatttttttatttgattttatttatattttgttgattggtttattttatagagagttaattggttcgttttgatagggtgttgattggtgtatttataatttttgagttagatatatatagagtgttgattggtgtatttataattttttagttagatataaaaattttttaagtttttattatatttgttagatatagagtattgattggtgcgtttataaatttttagttagatatagagtgttgattggtgtatttgtaaattttgagttagatatagagtattgattggtgtatttataattttttagttagatatagaagttttttaagtgtttattagattagttagatatagagtgttgattggtgtatttttaaattttaagttagatatagagtgttgattggtgtatataaaatttttaggttagatataaaagttttttaagtttttatttgatttaggagtttagttggttttatttagtggattttgcgtagggttgtgtcgggcgtttgtattttttttagtttttgggtagtcgatgggatcgggcgttgaggagtagggggcggtgttcgtcggggaggtttaggttacgttggagtttataggggttgggagggggttcgggtatggcgggttgtaggttttgagttttgttttgtgtagggcggttggggttcggtgagaatttaagcggggtgtaggcgggtcggtagtgttgggggattcggcgtattttttgtagttgttggttcgggtgttaggtttttgattgttcggggtcgggggtgcggggttcgttgagttcgcgtttatttggaattcgcgttggttggcgagcgttgcgcgtagttttagtttttatattcgtttttttttttatattttttcgtaagtagagggagtcggttttggtttcggttagtttagagaggggtttttatagcgtagtggcgggttgaagggtttttttagtacggttagaatggacgttaaggtcgaggaggcgtcgagagcgagcgagggttgttagtacgttgttatttcgtattttgaattatagattttttaatttttcggcgtttttcgtttattcggttttttagaatacgaagggtttttttattttgttattaaaacgattagttgttcggagatacggaaaaagtcgttttttttttttgtaggattttttttttgaatttttttaaatttttttagtgtgacgtgattttatttttagttaatttaggttgtttttttattagtttttcgttttttggggaggcggtaatgtaaagatcgttcgttgttagttttgtcgttatttttgtggggtgaatttaatatggcggataaagatagtaattagtttcgttttttcgcgttttcgttaagaagattggtttttattatttgttttttaaaacgattattttattgattggtggcgattgcgtcgacggagacggggtaaaagtaagttgaattcgaaaaataataaatattggggttgaggggtggaattacgagtgcgtagatatgggttagagcgtattttttttgttttaggtaaattcggcgtttattgcgttttcgtaggttattgattttataagattatttgttttagatttttggggttggatgggaattgtagtttttttaaagagttgtacgtatttttttaaggtttagtttttgtttttaaaatacgaaaatataatattttagtttataattgttgataagtataagcgcgtataggtttttaatttatttattggattttcgtgagaattgtgttcgttttggtattggatgtttttttttataagattatagtttttaaggaatattgtggcgaagattttttatttcgtaacgtatgttggaaataattatttttttttatttttttaataatttttattatttatatttatcgaaattggagatttttattagggcggaaagagtgggggattgggatttttttttacgattgttttggataataggtagcgattttgattttcgtatagtaattattgtgatgtaataagtcgtaattggaagagtagaggttagagggtaggtattttatggtaaatttaggtagaattttttttttttcgtttttttttttttacgttattcgggggtagattgggtggttaatttagagtttcgagagacgtttggttttttttgttttttttattttttgattgtattttgatttcgtattttgagaggttgttgtttagcggtagttttttggttttcgtggtaacggaaaagcgcgggaattatagataaattaaaattgcgattgcgcggcgtgagttcgttgagattttttggacgggggataggttgtggggttttttagataattgggtttttgcgtttaggaggtttttattttttgttttgggtaaaggtagtagagtttcgggaaagggatagggggtttaagtgatgttttggggtattggcgtgggagagtggattttcgaagttgatagatgggtattttttgacggggggtaggggcggaatttgagaggcgtaaggcgttgtgaattttggggaggggggtagtttgtaggtcgcgagggaagcgttgaggattaggaagggggtattgagtgttcgtgggggaattttcgtgataggaattggaatatgttttgagggggatattatgtttttaaaaacgtcggttggttatgaggttaggagttttagattagtttgattaacgtggtgaaatttcgtttttattaaaaatataaaaattagtcgggcgtggtgtcgttttagttatttaggaggttgaggtaggagaatcgttagaattcgggaggcggaggttgtagtgagtcgagatcgcgttattgtattttagtttgggcgatagagcgagattgttttaaaataaaataaaataaaataaaataaaaaatatcggttggtatgtatgagaggatgggattttgtggaagaagaggtgttaggaatatgtttgggaaggggaggagataggattttgtgggagggagaatttaagaattggatttatttgcgttattgagaaagcgtaagagggaagtagaggagcgttagtagtaatagatgttgtcggtagggatgtgtttgaggaggatttagagatgagagtaggttattgggaaaggttaggggcggggaggttttgattggtgttggtttggtcgttgttgattttggttttatgtaagaaaaagaaaataattagaaatattggagaaagttaaggttattattatttattcggttagttatttttttgtagtttttttttttttggagaaaggaaaagatttaaggggttggtagtaatatgtgaaaaaatttagaatttatgttgtttaattataaaaagtaatttttagaatttttaaaaataaaggacgttgttattagttttttggtttgtattattttaaaattttttaaattttaaatttattttattttaaaatgataaaatgaagttgttattttataaattttttaaaaagatatatatatatgtttttttaatgtgttaaagt

SEQ ID NO: 105 - DNA, 6277 bp, Artificial Sequence
  chemically treated genomic DNA (Homo sapiens)
attttaatatattagaaaaatatatatatatatttttttaaaaggtttataaaatgataattttattttattattttaaaataaagtaaatttaagatttggaaggttttagaataatataaattaaagaattaatgataacgttttttatttttaaagattttagaagttgttttttgtaattagataatataaattttgaatttttttatatattgttgttaattttttgggtttttttttttttttaagaaagagaaagttatagaggagtgattgatcgggtaggtggtggtagttttagttttttttaatgtttttggttgtttttttttttttgtataaaattaaaattaataacgattaaattaatattaattaaggttttttcgtttttaattttttttagtgatttgtttttatttttggattttttttaagtatatttttgtcggtagtatttgttattattgacgtttttttattttttttttgcgtttttttaatggcgtaaatggatttagtttttaagtttttttttttataaaattttgtttttttttttttttagatatatttttggtatttttttttttataaggttttatttttttatatatattagtcggtgttttttgttttgttttgttttgttttgttttgagatagtttcgttttgtcgtttaggttggagtgtaatggcgcgatttcggtttattgtaattttcgtttttcgggttttagcgatttttttgttttagttttttgagtagttggagcggtattacgttcggttaatttttgtatttttagtagagacggagttttattacgttggttaggttggtttggaatttttgattttatgattagtcgacgtttttaaagatatagtgttttttttaaggtatattttagtttttattacgaggatttttttacggatatttagtgttttttttttgatttttagcgtttttttcgcgatttataaattgtttttttttttagggtttataacgttttacgttttttaggtttcgtttttatttttcgttaaagaatatttatttgttagtttcggaaatttatttttttacgttagtattttagagtattatttgggttttttgtttttttttcgggattttattatttttatttagagtagagggtgaaggttttttgagcgtaggggtttagttatttgagaaattttatagtttgtttttcgtttaggaagttttagcgagtttacgtcgcgtagtcgtagttttaatttatttgtaattttcgcgttttttcgttgttacggaaattaaggggttatcgttaagtagtagttttttagaatacgaaattaaggtataattagaggatgggagggatagaaagagttaagcgtttttcggggttttggattggttatttagtttgttttcggatgacgtaaaaggaaagagacggaagaggaagaattttatttgagtttgttataaagtgtttgttttttagtttttatttttttagttgcggtttattgtattatagtaattgttgtacgaaggttagaatcgttatttattgtttaaagtagtcgtaagaagaggttttaattttttatttttttcgttttaatggaggtttttagtttcggtaaatataagtaataaggattgttgggggggtggagggaaataattatttttagtatgcgttgcggaatgaaaggttttcgttatagtgttttttagaaattgtagttttatggagaggaatatttaatattagagcgggtataatttttacggaaatttagtggatagattggagatttgtgcgcgtttgtatttgttaatagttatggattggagtgttatgttttcgtattttgaaagtagaaattaggttttaaaaagatacgtataattttttagggagattataatttttatttagttttaggagtttggggtaagtagttttgtaaggttagtggtttgcggggacgtagtgagcgtcgaatttgtttggggtaggggaaatgcgttttggtttatgtttgcgtattcgtagttttattttttagttttagtgtttgttatttttcgggtttagtttgtttttgtttcgttttcgtcgacgtaatcgttattagttaatggggtggtcgttttgagggataagtggtaagagttaatttttttggcgaaaacgcggagaaacgggattagttattgtttttgttcgttatgttagatttattttatagagatagcggtagagttggtagcggacggtttttgtattgtcgtttttttagggggcgggaagttggtaaggaagtagtttgggttagttaggggtggggttacgttatattaagagggtttggagaagtttaagggaggaattttgtaaagaagaggggcgatttttttcgtgttttcggatagttaatcgttttagtgataggatgagagagtttttcgtgttttgagggatcgagtgggcgaaaagcgtcggagagttggagagtttgtggtttagaatgcgaggtgataacgtgttagtagttttcgttcgttttcggcgttttttcggttttggcgtttattttggtcgtgttggaggagttttttagttcgttattgcgttgtgggggtttttttttgggttggtcgaagttagagtcggttttttttgtttgcggggaagtgtggagggagaggcgggtgtgggaattggggttgcgcgtagcgttcgttagttagcgcgagttttaggtgggcgcgggtttagcgggtttcgtattttcggtttcgggtagttaggggtttagtattcgggttagtagttgtagagggtgcgtcgggttttttagtattgtcggttcgtttgtatttcgtttgaatttttatcgggttttagtcgttttgtatagggtaaggtttaggatttgtagttcgttatgttcgagtttttttttaatttttgtgagttttagcgtggtttgagttttttcgacgggtatcgttttttgttttttagcgttcggttttatcgattgtttaagggttgagaggagtgtaggcgttcggtatagttttgcgtaggatttattaggtgaagttagttgggtttttgagttagatggggatttggaaaatttttatgtttagtttgaggattttatatgtattagttagtattttgtgtttagtttggggtttggggatgtattaattagtattttgtatttagttaatttggtgggtatttggagaatttttgtgtttagttaaaggattgtaaatgtattaattagtgttttgtgtttagtttaaggtttgtaaatgtattaattagtattttgtgtttagttaaaggtttgtaaacgtattaattagtgttttgtgtttagtaaatgtagtggggatttggagaatttttatgtttagttagaggattgtaaatgtattaattagtattttgtgtatatttagtttagggattgtaaatgtattaattagtattttgttaaaacggattaattagttttttgtaaaatggattaattaataggatgtgggtggggttagataagggaataaaagtaggttgtttcgttgggtgttagtggtttatatttgtaattttagtaatttgggaggtttagaggggtggattacgaggttaagagatcgagattattttggttaatatagtgaaatttcgattttattaaaaagataaaatattagttgggtgcggtggtgggtgtttgtaattttttttattggggaggttgaggtaggagaatggcgtgaattcgggaggcggagtttgtagtgagtttagattgtattattgtattttagtttgggtgatagagggagattttattttaaaaaaaaaaaaaaaaaaaaaaaaaaatgtaggttgtttgagttagtagtagtaattcgttttggtttttttttacgttgtggaagttttgtttttgtgttttttgtaataaattttgttgttgtttattttttgggttcgtatagtatttatttgttggtaatatcgatcgtagaggtttgtagttttatttttgaagttagcgagattacgaatttattaggaggaatgaataattttagacgggaggaacgaataaattttagatatgtcgttttaagagttgtaatatttatcgtaaaggtttgtagttttatttttgaagttagcgagattacgaatttattagaaggaggtaattttgaatacgttcgaatattagaaggaataaattttggatatattatttttaagaattgtattatttatcgtgagggttcgtaattttatttttgaagttagtgagattaagaatttattaatttcggatataagaatattcggtttttattgatggaaggttacgattttttagtagaaagagggtttaggtaaagaaaatgagagagagtttttggggtggtgatattattttgggaatatggagtgttaggaaacgataattggaagattaggatgaaatttgtaagttaaaaaatgatattatttatatattttttttattttattttttttttttcgagatttcgttaaagagattttggttagggatttttggttttggaaaggtattgttttttttttttgttaaatatttaatttttaggttatatttttttttttttttttcgagataaagtttcgtttttttaaagattagtttaggttggttttgaatttttgagtttaagcgatttttttgttttggttttttaaagtgttgggattataggtatgagttattattttcggttttagtttggataatttggtttgtataggtttttggtggagatagtaattaaagttcgggttgttaggtttgttttattaaagggattttgttgaggttgaaagaaaaaaaaatcgatgtggaggaaaagttaatttgtgttaagataaggtgagttagttatatggatttaataataatgttaattatgaaagttgaaggtttaggatttagttatttgattttattggttgtagatttaaggagtaggtagggttaattatagttttcgtgtttatatacgtttaagattaatgtttttgttgaaagaatttttttatatgttagttaaagagagttttttatggagatttggatatggtttagttaagttagaattttttattttttgtttttttttagttggtttattagttggaggagttttagaatatttaaattaatttttaattgtgtaatttgagaaaaagagacgaagattaatttttttaacgagtagggaagtgtgtttttttttttttttttttttttgagattgagtttcgttttgtcgtttagtttgaagtgtagtggtacgatcgcggttagtgtattgcgaattttgtttttcgggtttacgttatttttttgttttagtttttcgagtagttgggattataggtattcgttattacgtttagttaattttttgtgtttttagtagagatgggggttttatcgcgttagttaggatgatttcgattttttgatttcgtgatttgtttttttcggttttttaaagtgttgggattataggcgtgagttatcgtatttggtaggaagtgttttttaaagttggaaagtggtattttagaatattcgtttttggtagattgagttagttattttatttttttgattttttgtttaaggttttggtgaattgataaagattttgtttaaattttaacgattttagtaattatatgttatatgaatgaatatttgacgttagtaggattgcgttttggtggtgaatttggttttaggtagaaataaagaatggagaaaattgggggataattattttagggttttaaaaaagtgtttgatttttatagattttagggtttttaaaataatagttttaattgtagtgttttatagggtagtgtattatattgttaaaaatagtataggtttatggttttaatgattggtttattatttttaaaaatgtttaattgaatttaatttttttaaggagatagggttcggttttgttgtttaggttggtttttaatttttaggtttacgatttttttattttagttttttagattgttaggattataggtatgagttattatatcgggttaattttttattttatttttgagatagagtttcgttttattatttaggcgggagtgtagtggtatgattttggcgtat

SEQ ID NO: 106 - DNA, 6104 bp, Artificial Sequence
  chemically treated genomic DNA (Homo sapiens)
tagttttgaagtaggtagatatgtttatatttttttttgagttagtgtttggatttaggggattagattttttatttgatatggtagagagataagttatgttttaggtttttaaaaggagtttggaaaatataattaatttaagttaaatatttttattatttttttgtatatataataaagataaaaatatttattttattaaattgttgagagtaagaaagataatatatatatagtgtttggtatacggatggaatttagttgatggtagttataatatttataatattttttttttgttttaatttaatatgatttatatgattttttatatttattgtatatgtaatattttttagataattttatatttaggttattagtaaaatattgatattttttttagtatttatatagatgttttttttttaaagtttttagtaaaatttttattggggaattttagttgttttttatttttttttttttttatttttatttttatattaaaggtttttatttttaaggtatataatatgatattttgatatatgtatattttgtgaaatgattgtaataattaagttaattaatatattattattttatatagttttttgtgtgtgtgtgtgtgtgtgtgcgtttagagtttttgagatttattttttttgtaaattttaagtatatgttaattatagttattaggttgtatattaggtttttagaatttatttattttataattgaaaggttgtattttttaattagtattttttttttatttttaatcgtagttttaaataattattattttaatttttgttattgagttcgatttgttttttgagattttatatataagtgagattatgtattacgtgtttttttgtgttttatttattttgtgtgttataatattttttaggtttagttatgttggtataaatgataatattttttttttttgaataatattgttgattaatattttattgtgtgtgtgtgataaatatatattatattttttttaataatttatttattaatggatatttaggttgtttttgtattttggttattgtgaatttcgttgtttttttggtagttatttttgtatttttttttttagaagtagttttattgtagtttaaaagtgttttaggaaaatgatttagaagtaattattttttttggtatgttttttagtaaatacgatgatggaaagttttgatttttgtttttttttaaatagtgtaatcgatttttagttgggattttttttagttaatttgatagttttacgtttttattaggttgaagaaaatgtatgtgttgtgggttgttgtattattgttgttggtggtgttgttgttattgttgagattttgtggttgagtttatattataaaggaattgtagagtagtaataaatttaatttgagttttgaatttaagtttttaggtgtgatttttttaattacgtggaaatttacgtaagaatttttaattagattttatgtttatttttattttttaagtaaagggtataggaatttggtttaaacgaatgggaataaatattatagttagattttattggagtgttgtaaaaatgtttttttttaaaattagattgttttaaaattgattttggtttttagatttttaagttaggaagtaagatagtaaaaattaagggttaaatagttaagcgattatttttttaaaattagtattttttttggcgattttcgttagattatgttttgtttagtattgaaatttagagaagttttaggaatagcgggatgaaatttaagtgattcgtttacgggaagttttatttttttttcgttcgtttagtaaattcgggatgggtttagagaatgatttcgtattttgtattagaagattttagtttttagagagaattttagacgaaatttttatttttttgttttatttttgaaaatttttatttgggaatcgatttgttgtgataaataaaatgggaggagtttggttgaatagtttgtggatttcggaaagtaaagcgaaatgtcgttttaattaggttcgaattttttgtaagttattttgtgaaattggtgaatttgttagaatgaatttttatttatttaattttggcggatcgtttattagggtgtttggtatggtgttaattgttggagaaaatgatttttaaataaaaacgaaaaaaattttcggtttttagtaaggagttaggtaatttttataaatttaaggagtgtttgagaggtgagttaatgatcgttttttttgttttaaagagatagatttttatagttagttttgaaattgttcggggttatattagcgttttttggacgtagattttggttagcgttttacggtattagtttttgatttgtagttgttaaagatttgatagtggggagtacgtgtttattttgaaggttgaagatatatattatagttaggagtagaatttcgattttttaaagtgatatggttataaaatttgcgtttattggtttttattttgcggttatcgtggtacgggcgaaagttatgaattttttttttaggaaaatatatattatagatatatatatttataaacggttttaggaggtttttatgttagaaatttttggttttggaaaaaaattattttcgttgaagtatgtggtagttgagcgtaaatatttttttgttatagttttagtggtagaggtttaagtattacgttttatttagtgttcgtattgcggttttcgtaattttttaagtagttttgtatcgaaaatttaggtcggagattcgagtttaaattgttgaaaagttttaaggtttcggatagggttttagtaggggttatttttttttaggattcggggtttattgtgtttaagattcgttatttaagttttgttttgcgcgtacgttgtttgttttacgttttgcgttgatacgcgtcggtgttttttcgggttagttttagtttcgggttttgtggtcgttttgtcggcgattttgcggagagcgagttttagatatttagtttttagtttcgagttgttattttttcgttgtagttaagaaggaggagattaattaagggtattttagaagttaggcgttttcgttgttttttttgagtacggaggttattaattttttagggggaagagatgtagcgcgaggtaggggtgtcgtgttaagaaatttcgacgtttttggggattgaggataaaggtgcggatacgatttcggggtatttggagtttcgtgattcgcgttacggacggtatatttaggggttaatttttgttttgttttaaagaattttaagttagagtttttgttttcgtttatagtttcgggatgtcgttgttgcgtttatcgtataggtagcgttcggatcggttgtagtagatcgcgcgttgcgcgttttatcgggagatggtggagacgttgaaaagttttttttttgttattttggacgttgtgggcggtaagcgttttagtttttatttttgttgagttgaacgtttaggtatagtggaattgaaattcggttttgcgggatgtgagagttgttgaggttacgcgtaattgggtgtgatggagggcgtttgttcgtgatgtgtgtaggtttgatgtaagtaggttatcgtcgtgcgagtgtgtggatgcgatcgttcgagagattcggaggtaggtttgggatacgtttgagtgaatattttaggatatttttttggttagtatttgttttttagtgtttgtgatttagagtgggtatatgttgggagatagtaatgggtttgggtgtgtgtaaatgagtgtgatcggaagcgagtgtgagtttgatttaggtagggattatatagtattgttatatttgtttgttttttagtagaggattgaagtgcgggggtgggggtacggggtcggaatagaatgtttttgggatattttggtaaatagtagtcggaagtaaaggggtagttgtgtaaacggtttaggtaggtgatggatggtagggtaggaagggggaggtttagaggtttggatggaggttttcgtatttgtattttgtaatttattttttaggtttagtaggttatcggttttttttttatatatgtaatggatttgaagagtatttcgggatagttcggggagatggagattcggaaagtatttatggagattttatagaattttttgtgcggattaggaaatttttgtagatttttgtttatttgaggtttaggcgttgggttgttttttataatatttttttaagatgagattgtggtttttattttaaagatgagtatattgagtttttgtgaagttatttgtttatgattatataattaggaattgggttaattgtaattgaatttttgtttaataaagtttttgtttttagtttcgttttttgttttttacgagttttggttttttgtgggtaatattagttattggagttagattttttgggtttagaatttatttttaggggtattaatttttaaaattttatttgggtaggggtttgggattagagttggaagagtttttataattttggatttttttcgttaaatcgtgaaattaggggtggagtggggcgagggtttaaaattaggtcggattgagaggtgaaatttattatgacgttaaattgtttttaaattttcgtttattttaagggcgttatttgttggtgtttttattattttttattatttttattaatgattttaatgtaaatataagtgggacggttttgttggattttttaggttttggaagtatgagggtgacgtaatttaggggtaaaggattttttcgtttattggttgttgtgtattggcggaattttttcgatttatagcggcgggaataagagtagtcgttggcgttgggaggtattagagatattgtttagtttaagtgtcgtcgtcgtttttatagggttttgttggacgtcgtcgtcgtcgttgttatcgtttttgatttaagttatttttcgttaggtgagtttcgagattttggtttaggtatatgtttttttttttttttttttttattcgttatttttttatttttttttttttttttttttttttttcgttagtttttttattagatagtttttgttagttcgcgatttatattaggttcgtgttttaggttggatcggatagttttaatttttcggttcgttttttttgttcggttgcggattttagttttattttttcgtattgtatataggtttaggttagtttcgggatatttaggttttttagggatcgcgtatagagtttgaggtaagagaaatttttcgtagacggtgcgattagggacggcgtttggagtttagtagttttagggaaattggtttagaatttggaatagagcggatgggtggtaaataggtacgacgattgagggataagtagttttaaattgtaagttttagttataggttttgggagtaaagagagaaagttttgggttttaatttaagagtaaaatttggtttttgtaggggattgaggtgttagtaggcggagtttaggttgagtattaaaattgatttttttattttttagattttaattgtagagataatttttgtggatagattttattttttttattaaggtgtatgtaaaagttttagaagaggaggatagttttgggtttttttatgggattagtttttgtgataggggtttgggagtatgttttttatagagatttggttaataggtttatatgtatttgtgtggttttggggagaagggtaggattgagattttttttatttagttttttttttaggatcgtttttttagttttattagattgtgtatgttataggtttattgaattttttagaagtttattgtgttgatgaggaaataaaaaagaagagaaatataatgattagtttgaagttataaagttagagcgttagaagtaagatagaaaattaggataggagttaaggtttgtgggtttttagaatttcgaattggcgtaggtggtttattttattttttttttgtaga

SEQ ID NO: 107 - DNA, 6104 bp, Artificial Sequence
  chemically treated genomic DNA (Homo sapiens)
tttgtaagggaagaatgagataaattatttgcgttagttcgaagttttaggagtttatagattttggtttttattttggttttttgttttgtttttaacgttttggttttgtggttttagattggttattatatttttttttttttttgtttttttattagtatagtggatttttgggaggtttagtgggtttgtagtatgtatagtttgatagagttggaggagcgattttagagggagagttgagtgggggaggttttagttttatttttttttttaaagttatatagatatatataaatttgttagttaggtttttgtggaggatatgtttttaggtttttgttatagaagttgattttataaggaaatttagagttgttttttttttttggggtttttgtatatattttggtgggaggggtgggatttatttatagagattatttttgtaattggaatttgagaaataaaagaattaattttagtgtttagtttaagtttcgtttgttggtattttagttttttgtaggaattaagttttatttttaaattgggatttaagattttttttttttgtttttagagtttgtgattggggtttgtagtttagggttgtttgttttttagtcgtcgtgtttatttgttatttattcgttttgttttaggttttgaattaatttttttgggattgttgggttttagacgtcgtttttgatcgtatcgtttgcggaaagttttttttgttttaggttttgtgcgcggtttttggggagtttgagtgtttcgagattggtttaagtttgtgtgtagtgcgagagagtaagattggagttcgtagtcgagtaggaagagcgagtcgggggattgagattgttcgatttaatttagggtacgagtttggtataaatcgcggattaatagagattatttgatgaagagattaacggagagagagggagaggaggaaagggagtgagaaaatgacgaatggagggagagggagggagagatatatatttgagttaggatttcggggtttatttggcgggaggtggtttggattagaggcggtggtagcggcggcggcggcgtttagtagagttttgtggaagcggcggcgatatttgggttgggtagtgtttttgatgttttttagcgttagcgattgtttttattttcgtcgttgtgggtcgggaaagtttcgttagtgtatagtaattaatgggcggaggggttttttgtttttgggttgcgttatttttatgtttttagaatttggaggatttagtaggatcgttttatttgtatttgtattgaggttattgatggaaatggtgggggatggtgggggtattaataagtaacgtttttaaagtgagcgggaatttgagggtagtttgacgttatggtgaattttattttttagttcggtttggttttgaattttcgttttattttatttttggttttacgatttggcggaaagggtttaggattgtagggatttttttaattttgattttagatttttgtttaagtgagattttaaaggttaatgtttttaagggtgggttttgggtttaagaaatttgattttagtagttggtattatttatagagggttagggttcgtgggaaataagagacggagttgggagtaagaattttgttagataggagtttaattatagttggtttaatttttggttgtgtgattatgggtaagtaattttatagaggtttagtgtatttatttttgaaatggggattataattttattttgaaggaatattgtgagaaatagtttagcgtttgggttttagataggtagggatttataagagttttttggttcgtataggggattttgtaagatttttatggatatttttcgaatttttattttttcggattgtttcggggtattttttagatttattatatgtgtgaggagggggtcgatgatttgttgggtttgaggggtgagttgtaaggtatagatgcggaagtttttatttagatttttggatttttttttttttattttgttatttattatttgtttgagtcgtttgtatagttgtttttttgttttcggttgttgtttgttaagatgttttagagatattttatttcggtttcgtatttttattttcgtattttagttttttattaaagagtaggtaggtgtgatagtgttgtgtggtttttgtttagattaagtttatattcgttttcggttatatttatttatatatatttaaatttattattgttttttaatatgtgtttattttgaattatagatattaaaaaatagatattggttagaagagtattttgaggtgtttatttaaacgtgttttaagtttgttttcgagtttttcgggcggtcgtatttatatattcgtacgacgatgatttgtttgtattaaatttgtatatattacgaataggcgttttttattatatttaattacgcgtgattttaatagtttttatatttcgtagaatcgggttttagttttattgtgtttgagcgtttagtttagtagaggtagggattaaggcgtttgtcgtttatagcgtttagagtggtaagaaagaagttttttagcgtttttattatttttcggtggaacgcgtagcgcgcgatttgttgtagtcggttcgggcgttgtttgtgcggtgagcgtagtagcggtatttcggggttgtgggcggaggtaaggattttagtttgaggttttttgaggtagagtagaaattagtttttaggtgtgtcgttcgtggcgcgagttacggaattttaggtatttcggggtcgtgttcgtatttttgtttttagtttttagaagcgtcgaaattttttagtacgatatttttgtttcgcgttatattttttttttttagggggttggtggttttcgtgtttaaaggaggtagcgggaacgtttaatttttaagatgtttttaattgatttttttttttttaattatagcgagggaataataattcggggttggggattgggtatttaagattcgtttttcgtagggtcgtcggtagggcggttataggattcgggattggaattggttcgggaggatatcggcgcgtgttagcgtagagcgtgaaataggtaacgtgcgcgtagagtagggtttggatggcggattttgggtataatgagtttcggattttgaaggaagataatttttgttgagattttgttcggagttttggagttttttagtagtttaggttcggattttcggtttgggttttcggtgtagagttgtttgaagagttgcgaaggtcgtagtgcgggtattgagtggggcgtagtgtttgggtttttgttattggggttgtagtagaagggtatttgcgtttagttattatatattttagcggaaatgatttttttttaagattagaggtttttaatataagaattttttgaaatcgtttgtaagtgtgtgtgtttgtgatgtgtgtttttttaaagagagagtttatagttttcgttcgtgttacggtgatcgtaaaatgaaagttagtagacgtagattttgtggttatgttattttgaggggtcggaattttatttttgattgtggtgtgtgtttttagtttttagaatagatacgtattttttattattaaatttttggtagttataaattaaaggttggtgtcgtggggcgttaattagagtttgcgtttagagggcgttagtgtagtttcgagtagttttaagattgattgtaaaagtttgtttttttaggataggagggacggttattaatttattttttaagtattttttgagtttgtaggaattgtttggttttttgttgggggtcgaaagtttttttcgtttttgtttgaaaattattttttttagtaattagtattatgttaggtattttagtagacgattcgttaaagttaaatgaatgaaaatttattttggtaaatttattagttttataaggtagtttgtagaaaattcggatttagttagagcggtatttcgttttgtttttcgaaatttataaattatttagttagattttttttattttatttgttatagtaagtcggtttttaggtagaagtttttaggaatgaggtagggaagtaaggatttcgtttagggttttttttaaagattgagattttttggtgtaaaatgcgaagttattttttgagtttatttcggatttattgagcgagcgaaggaagggtagagtttttcgtgagcggattatttagattttatttcgttatttttggaatttttttgagttttagtattaaatagagtatggtttaacggaagtcgttaaggaaaatgttgattttaaaaaaatagtcgtttgattatttgatttttgatttttattgttttattttttaatttaaaaatttggaaattagggttagttttgaaataatttgattttggaaaaaaatatttttataatattttaataaagtttaattgtaatgtttgtttttattcgtttagattagatttttgtattttttgtttaagaaataaaaataaatatgaagtttggttgaaaatttttacgtgaatttttacgtgattaaaaaagttatatttgaaggtttgagtttagagtttaagttaaatttattattgttttataatttttttataatatggatttaattataaaattttagtagtagtaatagtattattagtaatagtaatataatagtttataatatatatattttttttagtttggtagaaacgtggagttattaaattaattggaaaaaattttaattgaaaatcgattgtattgtttaaagaagggtagaaattaaagttttttattatcgtgtttattgaagaatatgttaagagaagtagttgtttttgaattatttttttaagatatttttagattgtagtaaagttgtttttggggaagggagtatagaaatggttgttaaagagatagcgagatttataataattaagatatagaaatagtttaagtgtttattgatgaatgaattattaaagaaaatgtggtgtgtgtttattatatatatataatggaatattagttagtagtattatttagaagaaggaaatattgttatttgtgttaatatggttgaatttggggaatattatgatatataaaataagtgaggtatagaaagatacgtaatatatgattttatttatatgtagaattttaaaaaataagtcgaatttagtaataaaggttagaatggtgattatttggggttgcggttgggggtaaaagagaaatattagttaaaggatataattttttagttataagatgagtaagttttggagatttaatatatagtttggtgattatagttaatatatgtttgaaatttgtaaagagagtagattttaagagttttaagcgtatatatatatatatatatataggaaattatgtgaggtaatgatatgttaattaatttgattgttgtaattattttataaagtatatatgtattaaaatattatattgtatattttaaaaataaaaatttttaatatggaaataaaagtgaaaaaaaaaaagagtgagagatagttgaaattttttagtgggaattttgttgaagattttagaagaggggtatttgtataaatattgaagaggatattaatgttttattaataatttagatatagaattatttaaaagatgttgtatgtgtagtaagtatgaaaagttatataaattatattaaattgaaataaagaaaagatattataaatattataattattattaattaagttttattcgtgtgttaggtattgtgtgtatattattttttttatttttaatagtttaataagatagatatttttatttttgttgtatatgtaagggaatagtaagagtatttggtttgaattaattatattttttaggttttttttgaggatttgaaatatagtttatttttttgttatgttaggtaagaggtttggttttttggatttaggtattgatttagaggaagatatgggtatgtttgtttgttttagggtta

SEQ ID NO: 108 - DNA, 1630 bp, Artificial Sequence
  chemically treated genomic DNA (Homo sapiens)
gagttcgagttacgttatgttcgttgtacgtgttagtttgcgtagtatattagggcgttggtttttttttttttttttggagtgaaatatattaaagggcgcggtgggggtggggggtgacgggaggaaggaggtgaagaaacgttattagatcgtattttttgtaaagatagttttgatttaaggatgcgttagagtacgtgttagggtcgatcgtgttggcggattttatcgtagtcggtttttagggagaaagtttggtagagtgaggcgcgaaatcggagggtcggcgaggatgcgggcgaaggatcgagcgtggaggttttatgttttcggggaaaggaaggggtggtggtgtttgcgtagggggagcgagggggagtcggatttaattttttattcgttttttttttttttcgggttattttttagaaagttgtatcggtgtggttacgtttagcgtagatatttcgggcggtttgttagtagatgtaggggcgaggaagcgggttttttttgcgtggtcgttgggcgggggaatcgttgggagttttgttttcggtttgcggcggttttagacgttgtatcgcgtcgttttacgggtttcgaagagtttttagaaatacgatggtttttgttcgaggattatattttatttttttagagaagtatttttttttttttttaatatttattttttttttttttttttttttttgtatatattttgtaggggggggtagaagggacgttgttttggtttttttaatcggggttttcgaaatagtttcgaagttattaggaatatagattttagggatatgatttttatttttgggtatgcgaggttgttattttttaaaattatttttttttttattttttatttaagggatttatttttaaattgtttgaggttattttatttttagataatttattttatatttttggattttaaatataagggtaggaggattaggattcgttttgaagaagttaaagttggagggtcgtattttggcgtgttatatttatagaatgagtgaaattagagggtagaaataggagtcggtagttttttgtgggttgtttgttcggggtttttggtatgtaggttggatggagggagaggggtggggggtggcgggggatcgcgtttgaagttgggtcgggttagttgttgttttttttaataacgagaggggaaaaggagggagggagggagagattgaaaggaggaggggaggatcgggaggggaggaaaggggaggaggaattagagcggggaggcgcggggagagggaggagagttaattgtttagttagtttgcgttatcgttttagagcggagaagagcgagtaggggagagcgagattagttttaaggggaggatcggtgcgagtgaggtagtttcgaggttttgttcgtttattatttaattttcgttttttttttgttttattttttttttttgtttttatttttttttcgaaaattttttatttagttaaaggaaggaggttaggggaacgtttttttttttttttttaaaaaataaaaatagaaaaatttttttttaggtcggggaaagtaggagggagaggggtcgtcgggttggttatggag

SEQ ID NO: 109 - DNA, 1630 bp, Artificial Sequence
  chemically treated genomic DNA (Homo sapiens)
ttttatggttagttcggcggttttttttttttttgtttttttcggtttggaaaagggtttttttgtttttgttttttggaaggggaggggagagcgtttttttgattttttttttttggttaaatagggggttttcgggggagaggtgagggtagagagagaaggtggagtagaagggaggcgaggattgggtggtgggcgagtagagtttcggggttgttttattcgtatcggttttttttttaaaattggtttcgtttttttttgttcgttttttttcgttttgaagcggtgacgtaagttggttgggtagttagttttttttttttttttcgcgttttttcgttttggtttttttttttttttttttttttttcggttttttttttttttttttaattttttttttttttttttttttttttttttcgttattaaggagaatagtagttggttcgatttaattttaaacgcggtttttcgttattttttatttttttttttttatttagtttgtatgttaggggtttcggataggtaatttataaaaaattatcgatttttatttttgttttttaattttatttattttgtaggtgtagtacgttaaaatacgattttttaattttggtttttttaaaacggattttaatttttttgtttttgtatttaagatttaggaatgtagggtagattatttgaagatggggtgattttagataatttagaaataggttttttaagtgaaaaataagggagggggtgattttagaaaatagtaatttcgtatatttagagataaaggttatgtttttgaagtttgtgtttttgataatttcgaagttgtttcgaaagtttcgattaaagggattagaataacgttttttttgtttttttttgtagagtgtgtgtagaggaagaagagggagggagaggtgggtattaggaaggaaggggggtgtttttttggagggatagaatgtgattttcgagtagaaattatcgtgtttttgggggtttttcggggttcgtggggcgacgcggtgtagcgtttagggtcgtcgtaggtcgggggtagggtttttagcggttttttcgtttagcggttacgtaggaaaaattcgttttttcgtttttgtatttgttgataagtcgttcgaggtgtttgcgttgagcgtggttatatcgatgtagttttttaggaaatggttcgggagggggagggggcgagtgagggattaggttcggttttttttcgttttttttgcgtaaatattattattttttttttttttcggaggtatgaggtttttacgttcggtttttcgttcgtattttcgtcgatttttcggtttcgcgttttattttgttaggttttttttttgggagtcgattgcggtgaagttcgttagtacggtcggttttgatacgtgttttaacgtatttttgagttaaggttgtttttataggagatacgatttggtggcgtttttttattttttttttttcgttattttttatttttatcgcgttttttggtgtattttattttaggaggaaggggagagattagcgttttgatgtgttgcgtaagttggtacgtgtagcgggtatggcgtggttcgagttt

SEQ ID NO: 110 - DNA, 5976 bp, Artificial Sequence
  chemically treated genomic DNA (Homo sapiens)
agaggggtattttttattttaatttgaattttatgattgtattttttgttaggagatgaaagggataagattgtttgaaggattaatttttagtttttaggtaggttagtggttaaaatatttaggaagtgaaagtttgttttttgttataaggaaatttggagtttgtgattttattatgcggggtttgttatttgttaggtgatagggttttttatttatttgcggtgatttgaagggtaaggtttttggttaaatattttttttttttagtgatgtttgaaattttattgttagcgttggattttagtaagattttagagaaagtttaatttttggagtttgggttttttttagttgagatgttaggaaagtaatgggttttattatttgtacggataggtttgtgtatagttttaggggatttagggattttattagagtttatttatagatattaggttaaaagttttggatagtatttataatttttttgaaagaagaaaagtttttttttagagttttttttaaagtgtaaatggttttgggaggttcgaaatgatgagttggtcggtatgaaagaattttttttagtagatgtaagagataatttgaggagttttagtggcgggggtgggggaaggagagtttgggggaggggaggttttaggtagtttataattttttttagaattggaaagggaatgtattgggttaagagggttaattatttatttttgtagagtgtttataagaattttatgaattaagtgttattaatatttttattttatagatgaggaaattaagatggtggagataaaatgatttatgttttttaattaatggtagagttagaagtgaatttaggttggagtgaagtggttttagtgtttaaatgatttttttattttagtttttagagtagttgggattataggtatgtattgttatgtttagttaatttaaaataatatttgttggggagatggggttttattatgttgtttagattggttttaaatttttgggtttaagtaatttttttattttttaattagttttttaaagtgttgcgattatagttgtgagttattaggtttgtttaggtatttttgtttgatataagagaaaatagagggtaggtatagtggtttatatttgtaattttagtattttgggaggttgaggtaggtggattatttgaggttaggagtttgagattagtttggttaatatggcgaaatttcgtttttattaaaatataaaaattagttagatatggtgacgtgtgtttgtaattatagttatttaggaggttgaggtataagaattttttgaatttgggaggtagagagtgtagtgagtcgagatcgcgttattgtattttagtcggggtaatagagtaagattttgttattaaataaataaataggaaatagagaagtaatttagtgtgttgcgaaagttatatagtatttgttttttataaggagtttttttgtgttttcgttttattttggatatttgatttattgtttttggagtttggagaaggatttgtcgagaagtttgaagaatgtattaggtttgatttgattttgttgtttttaattgttttttaaaattttttttattgaattattagagtgtaatggaagagtcgatgagagtcgttgtagagttacgaggttaaggtttgttgggtagaagaaagtaaagttttaaaggtttttagggtttagcgatggtataaaatatgtatttttatataattgagaggaaaaaaataagtagatagtatagttttatgggggaaacgtttttttttgtatttttattattttgtttaaggtacgattttagtgggaaaggaaatatcggagttttttttttttgagttttttggtgggttaagagtagagggagttaaaatacgatatttaaaagatttgattggaaatttattaaaattgaggggataggttgttggggggggcggtgttgggttgtttagaaatcgtttgtatttgagaaattatttgatggatttagaggtatttttagttttgggtgaaatattttaaatatggttttttttaggaggaagcgaaataggggttgggttttttgaaagagtaatttttattttaaatatttattgagtagttgttatgatgagttaagaattttgtttagcgattgtttttgtattagtttatgttaatttatttatataaaggagaatattgatttttttaaggttatagggttagtgagtggttgattttatttaatgttgtgtagttttaattatgtttgaaggataaagggaaaggaggtgtttttgtcggggtagataagttatttagacgtggttggttatagggagttagatagggaagttgtttaatttaatatttgtttgtttattttgtttttgttttttgatggaggacggcgggtgttggagggttattggtttaggatttgagatttttggtttttatttattttatttttgattttaaaattattttattggggatagaattttttggagaaggtgatggtggttatggtgtggttgtggtattaaaagttttattttgggggttagaagattttgggttttggtttttggttttgatattgatttgtttatgtgatattgaataagttatttgtaaattataggtttgggtgaattttaaaggttttttttaggttaatattaaaaaatagattgaaaattgtagttttagttggaagattgggattatatgagatgaagttgattgttagaagaaaggttttggaattagagaggttggttttagttttgcgttattttttattggttttaatttttttaagttttagttgtttatttattatatgggaataataatatagtttttgggttgttttgaaatgagtttaaatgagttggttagtggttgggtacggtggtttatgtttgtaattttagtattttgggaggttgaggtaggtggattatttgaggataggagtttaagattagtttggttaatatgatgaaattttgtttttattaaaaatataaaaattagttagtcgtggtggcgtatgtttgtaattttagttatttaggaggttgatagaggagaatcgtttgaatttaagaggcgaaggttgtagtgagttaagaatatattattgtattttagtttgggcgatagagtaggatttcgttttaaaaaaaaaagagttggttagtgttaaatgtttagtatagagattggtatagtaatttttaatgtttagtatttattgttattattttttttttttttttttttttgagatagagttttgttttgtcgtttaggttggagtatagtggcgcgatttcggtttattgtaagttttattttttaggtttatgttatttttttgttttagtttttcgagtagttgggattataggcgtttattattacgtttggttaattttttgtatttttagtagagacggggttttattgcgttagttaggatggttttaattttttgatttcgtgatttgttcgtttcggttttttaaagtgttgggattataggcgtgagttattatgtttggttttattgttattatttttattttttatttttgtatagagtatttatggtttaagaaatatttgttattttaattgtatgggagttttataatagtatagggagatatttttgattattatttttattaggagggtggagaaattgaggttttgggaggtggttttgatttagggaattaatttgttgatttattaatttatgaagttttatagttaaaaaagattagattaaaaaatgagaatttagtaaaggggttgaggtaggaggatcgtttgagtttagaaatttgagattagtttcggtaatatagtgagattttttttttagaaaaattttttaaaaaattaggtcgttcgaggtagagtgtagtggtttacgtttgtaatttaatattttaggaggttgaagagggtggattatttgaggttaggagttttagattagtttggttaatatggtgaaatttcgtttgtattaaaaatataaaattagtcggtgtggtggtatacgtttgtagttttagttatttaataggttgagataggagagttttttgaattcggtaggcggaggttgtagtgagtcgagatcgtgttattgtattttagtttgggtaagatagagcgagatttcgttttaaaaaatataaataaaataaataaataaaaaattaggttgttagtttagtggtttatggtttatatttgaaattttagtattttgggaggttaaggtaggaggatcgttttagtttaggagttcgagattaggttgggtaatatagggagatatagcgtttttattgtttttgttcgtttcgatttgtttttttataaaaaggtaaaagaaaaaaaaattagtttggcgtggtggtgtgtatttgtatttttagttattagagaggttggggttagaggatcgtttgagtttaggagttcgaggttgtagtgagttgtgatcgtattattgtattttagtttgggtgaaagagtgagattttatttttaaaacgaataaataaaaaattttaaaaaataaaagaatttagttaagtgtaaaagttttttttgattttaggttttagtgagttatcggcggggttgggattcgaatttagtggaattagaatcgtgtaggttttataatttatttagattttagtaattttaggttagagggttatcgcgtttatgcgaggtcgggtgggcgggtcgttagtttcgttttggggaggggttcgcgttgttgattggttgtggtcggtaggtgaatttttagttaattagcggtacggggggcggtgttttcggggtttatttggttgtagttacgtatttttttttagtggcgtcggaattgtaaagtatttgtgagtttgcggaagttagtttagattttagttcgttttagttcggttcgattcgatcgtattcggcgtttgttttcgttcggcgttttcggttagttatgggtttttggagtcgtagtttttcggcgttgttgttgttgttgtaggtatttcggattttttgatttgcgagggacgtattcgggtcgtaagtttcgcgttttagttttgcgtttttttttttttcgtcgttatcgtttttttttttttaagaaagttcgggttttgaggagcggagcggtttggaagtttcgcgcgtttcggattttttagtgatgggagtggggggtgggtggtgaggggcgagcgcggtttttttgttttttttagcgtagatcgaggcgggggcgtttggtcgcggagttcgcggggtgggttcgcgcgggcggtgggggcgtgaagcggggtgtagggggtggggtgtggagaaggggtgttttggtgtaagtcgagggggagttaggagtcgtggggacgattttcgagggaaggagaggggtattcgtagaaataaaggtatttgttatgttaagaaaggtcgtaaataggagtgagggtttcggggataagaaagtgaggtcggaggaggtgggagcgtttttcgttttgaggagtggtgtattttcggtttaaggaaagtggggtattggagaataaagatatttttaataaaatgagaaaggagattgaaagggaacggtgggttaggttttgagggggtgattcggcggttttttttcgggagtttttgggggttcggcggtcgtaggtttcggggtgggggagggtgacgtcgttgttcgttcgtttcggggttgcgggttggggtttttttttaatttcgacgtcgggagcgagggaggggcggcgttgttggtttcggtgagtaggagggaatttttcgagttattcggttttatttattttttttttattttagg

SEQ ID NO: 111 - DNA, 5976 bp, Artificial Sequence
  chemically treated genomic DNA (Homo sapiens)
tttggggtgggggaaaggtagatggaatcgggtgattcggagggtttttttttgtttatcgaaattaatagcgtcgtttttttttcgttttcggcgtcgggattgggggaggattttagttcgtagtttcgggacgggcgggtagcgacgttatttttttttatttcgaaatttacggtcgtcgagtttttaggaattttcgggagggggtcgtcgagttatttttttaagatttagtttatcgtttttttttagtttttttttttattttattggagatgtttttattttttagtattttattttttttagatcgggaatgtattattttttagagcgaggggcgtttttatttttttcgattttatttttttattttcgggatttttatttttatttacgattttttttggtatggtaggtgtttttatttttacggatgtttttttttttttttcgaagatcgtttttacgatttttggttttttttcgatttgtattagggtattttttttttatattttattttttatatttcgttttacgtttttatcgttcgcgcgagtttatttcgcggatttcgcggttagacgttttcgtttcggtttgcgttggagggggtaggaaagtcgcgttcgttttttattatttattttttatttttattattggggggttcggagcgcgcgaggtttttaggtcgtttcgttttttaggattcgaatttttttggaagaagggaagcggtgacgacgggagaggaaggggcgtagggttggggcgcggagtttgcggttcgaatgcgtttttcgtaagttaggggattcggggtatttgtagtagtagtagtagcgtcgagaggttgcggttttaagggtttatggttggtcggggacgtcgagcgagggtaggcgtcgggtgcggtcgggtcgggtcgggttggagcgggttggagtttgaattgattttcgtaagtttataggtgttttgtagtttcgacgttattgagagggggtgcgtggttgtagttaggtgagtttcggaggtatcgtttttcgtatcgttgattggttgagggtttatttgtcggttatagttaattagtagcgcggatttttttttagggcggagttgacggttcgtttattcggtttcgtatagacgcggtgattttttagtttggagttgttagggtttaggtgggttatgggatttgtacggttttgattttattgggttcgaattttagtttcgtcggtggtttattaagatttgggattagaaagggtttttatatttggttgagtttttttgttttttgggattttttgtttgttcgttttggagatggggttttatttttttatttaagttggagtgtagtggtgcgattatagtttattgtagtttcgaatttttgggtttaagcggttttttggttttagtttttttagtagttgggagtataggtgtatattattacgttaggttaattttttttttttttgtttttttgtagagagataagtcggggcggataggggtagtgggggcgttgtgtttttttgtattgtttagtttggtttcgaatttttgggttgaagcgatttttttgttttggttttttaaagtgttaggattttaggtgtgagttatgagttattgagttagtagtttaattttttgtttgtttgttttgtttgtattttttgagacggagtttcgttttgttttgtttaggttggagtgtagtggtacgatttcggtttattgtaattttcgtttgtcgggtttaagagatttttttgttttagtttattgagtagttgggattataggcgtgtgttattatatcggttaattttgtatttttagtatagacggggttttattatgttggttaggttggtttggaatttttgattttaggtgatttattttttttagttttttgaagtgttggattataggcgtgagttattgtattttgtttcgagcggtttaattttttaaaaaatttttttagagaggggattttattatgttgtcgaggttgattttaaatttttgaatttaggcgatttttttgttttagtttttttattgagtttttattttttaatttagttttttttaattgtagagttttatgggttagtgagttagtaaattgattttttaggttaggattattttttaaagttttagtttttttatttttttaatgggaataatgattagaaatgtttttttatgttgttgtgggatttttatataattaaaatgataaatgttttttgagttataaatgttttgtatagaagtgaggggtaaaaatagtaataatagggttaggtatggtggtttacgtttgtaattttagtattttgggaggtcgaggcgggtagattacgaggttaggagattgagattattttggttaacgtagtgaaatttcgtttttattaaaaatataaaaaattagttaggcgtggtggtgggcgtttgtagttttagttattcgggaggttgaggtaggagaatggtatgaatttgggaggtggagtttgtagtgagtcgagatcgcgttattgtattttagtttgggcgatagagtaagattttgttttaaaaaaaaaaaaaaaaaaaaaatagtaataataggtgttggatattgaagattattgtgttagtttttgtgttaagtatttgatattgattagtttttttttttttgagacggagttttgttttgtcgtttaggttggagtgtaatggtgtgtttttggtttattgtaattttcgttttttgggtttaagcggtttttttttattagttttttgagtagttgggattataggtatgcgttattacgattggttaatttttgtatttttagtagagatagggttttattatgttggttaggttggttttgaatttttgtttttagatgatttatttgttttagttttttaaagtgttgggattataggtatgagttatcgtgtttagttattgattagtttatttaagtttattttaaaataatttaagagttgtattattatttttatatgatagatgggtaattgaagtttagagagattgaggttaatgagaggtggcgtaggattggaattaatttttttgattttagggttttttttttaataattagttttattttatgtggttttagttttttagttggagttgtagtttttagtttgttttttgatgttgatttggaagagatttttagagtttatttaaatttatgatttgtaaataatttgtttaatgttatataggtaggttaatgttaaagttaaagattaaaatttaggattttttgatttttagagtggggtttttaatgttatagttatattatggttattattattttttttagagaattttgtttttagtgaaataattttaggattaaaaatagaatagataggggttaaaggttttaggttttgggttagtggttttttagtattcgtcgttttttattaaaagataaaaatagaatagataggtaaatgttaggttagataatttttttgtttgattttttgtggttagttacgtttgggtggtttgtttatttcgataagggtattttttttttttttattttttaagtatggttagaattatatagtattaagtggagttagttatttattagttttgtgattttggggaagttagtgtttttttttgtataagtgaattggtatgagttaatataaaaataatcgttaagtagagtttttggtttattatagtaattgtttaataaatatttggagtaggggttatttttttaaaaggtttagtttttatttcgtttttttttggggaaagttatgtttggaatattttatttagagttaaaggtgtttttgagtttattaagtaattttttaaatgtagacgatttttgggtagtttagtatcgttttttttaataatttgtttttttaattttaatgagtttttaattaggttttttggatgtcgtattttggttttttttgtttttaatttattaggaggtttagagggagaaggtttcggtatttttttttttattaggatcgtgttttgaataagataatggaaatatagaaagaggcgttttttttatggggttgtattgtttgtttatttttttttttttagttatgtaaaaatatatattttatattatcgttgggttttgggagtttttagggttttatttttttttatttagtaagttttggtttcgtaattttgtagcgatttttatcgatttttttattatattttgataatttaataaaaaggattttagaaaataattaggggtagtaaagttaggttaggtttgatgtattttttagatttttcggtaagtttttttttaagttttaaagatagtagattaggtgtttagggtgaggcgggaatatagaggggttttttgtggaagataggtgttgtgtgattttcgtaatatattgaattgtttttttgttttttatttatttatttagtgataaggttttgttttgttgtttcggttggagtgtaatggcgcgatttcggtttattgtattttttgttttttaggtttaagagatttttgtgttttagttttttgagtagttgtgattatagatatacgttattatgtttggttaatttttgtattttagtagagacgggatttcgttatgttggttaggttggttttaaatttttgattttaagtgatttatttattttagttttttaaagtgttgggattataggtgtgagttattgtgtttgttttttgtttttttttgtattaaatagggatatttaagtaggtttggtggtttataattgtaatcgtagtattttgggaggttagttgggaggtgagaagattatttgagtttaggagtttgagattagtttgggtaatatggtgaaattttatttttttaataaatattattttgaattagttggatatggtagtgtatgtttgtagttttagttattttggaggttgaggtaggaggattatttgagtattggagttattttattttagtttggatttatttttggttttgttattagttgagaagtataagttattttatttttattattttggtttttttatttgtaaaatgggaatgttgatagtatttaatttataaggtttttgtaaatattttgtaaaggtgagtgattagtttttttggtttaatatattttttttttagttttaggaaaaattgtgagttgtttggagtttttttttttttaggtttttttttttttattttcgttattaaagttttttaggttattttttgtatttattggagaaaatttttttatgtcggttagtttattatttcgaattttttagggttatttgtattttaaagagggttttagagaaagatttttttttttttaaaggagttgtaaatgttgtttagggtttttaatttggtgtttgtggatgggttttggtggggtttttgaattttttgagattgtatataaatttgttcgtgtaggtgataaggtttattgtttttttaatattttaattggggaaaatttaaattttaggagttgagttttttttgagattttgttgagatttagcgttaatagtggaattttaggtattattggggaaaagaaatgtttggttagaggttttgttttttagattatcgtagatagataagagattttgttatttggtagataatagatttcgtatgatgggattatagattttaggtttttttatggtagaggatagatttttattttttgggtgttttggttattggtttgtttggaggttaaagattaattttttaggtagttttgttttttttattttttggtaaggggtgtagttatagggtttagattggggtgggaggtgttttttt

SEQ ID NO: 112 - DNA, 3486 bp, Artificial Sequence
  chemically treated genomic DNA (Homo sapiens)
aattaaagaggatgagattttttgtttgattttaggtgaatttttttttgttagttaggtaggaagttttgatttgaaaattagttttgggtattgttttttttattgttttttgggtattaatttttgttttttaattttagttgaattagtggatggtgatattataggtttaagatagttgtatttaaatattagtgattataggttatattaaggaaatatttgtaggtaatttagggtttgggaaggagttatttttagttatttgtaagatagtaggatttgtagattatagtataattaaatttagataaaattttgaattagtgagaattattaggaaggaaaggaatagaaaatgaattaatttgagtgttaggagatttgtatttagttttgatttcggtattaatcgaatgtatgtttttggataggaaatttttttgagtttcgatttttttcgtggtaaaaaggagagggttaaattatagggtttcgagggttttttttagttgttatattttggagcgtatgagatgaggtaggtatataaagtggataagatgtggttaagaaaataagttatatattaagtttatttgtagtataggtgtttaagaaaattttgttgttgtgtaatattagaacggaaggttggtttttagtaaaatgtattaattttggtttaaattaagatgatgggtatcgggtatgggggtggggaggtagttgaagatttattgagttttgttttagggtagttttgtttatcgttttattttattttttattacggtgtttaagtttatattgagagagaaatttttagttgtaaaagggagaagagaaacgttggaatattagtatcggacgttaggatatggttgtggtgttttaaaaattattttattatttggagtttgatttcgaggggagtatttttattttttagttttttgaaagtatttattagtatttgaatattgttttgagtttgttggagtagtgaaatttggtgagagagaagggtggaggaaggaaggagttgttgtatttggcggttggatttaggtagaggaaattgttataatttcgggaaagaatagaaaagtagaaagggacgagtttttatacgtagttaatgtttatggttttaattgtgtttgggaaggaagattttgggttaggggtgtattttcgttttttaaaattaaacgtgtttgagatagttataaagtttattaagggatttgagagattagagttttttgttttttttttttaattttgagttttttttttatttttattgagggagagtttgagtttatgataagtgtcgcgtttatttttggttaatttttaaaagaaagacgttcgttttggttttttttttaggtttttagtttttttagggatggtagaaatttttgggttaaggttgagcgaattattgtttattgtttttattagtttttagtaaaggtacgtcggcgggggggcgtttagtttttttagtaaacgtttcgcggtttttttcgtagattacgaggtgggggtcgttggggagggtcgagttgggggtagttcgttatttcggtttttagcgagttgtcggcgattttcgcggttttttggtttaggtttcggtttttcgggcgaggagcgggagggaggtcggggtttaggcgtcgcggcgaattcgttaacgtagcgtcgggtttcgaattttaggtttcgttttaggttttcggtcgtttggttagtttgtttgttttaattttaattttttcgaggttagttagagtaggtttgttggtagtagtatttttttagtagttacgcgattagttaatttttcggcggcgttcggggaggcggcgcgttcgggaacgaggggaggtggcggaatcgcgtcggggttattttaaggtcgcgttcgttagtttcggcggggcggttttcgtcgtcgtaattaatggatttttttttttgtttaaatagattcgtcgtgttaattattttttttttcgttagttttttttttatcgttatattgggttattaaaaaaagggggttcgttttttcggggtgttttttttttttttttttgttttcgtttgtttacggttttgcgatttcgacgtcggtaaggtttggagagcggttgggttcgcgggattcgcgggtttgtattcgtttagattcggacgggttttgttatttttttcgtttgtttggttttttttttttttcgttttttcgttcgttagtttatttgattagcggagattcggcggtcgggtcggggttttttcgtagtttttgcgcgtttttagagttcgggtcgtggttcgtcggggtttgtgttttttggtttcgagggtagtcgttgggttttcgagaggggttcgggttgcgtaggggcgttttgttttgttcggttttgtttttttgagagtgcgagagaggcggtcgtgtagattcgggagaaagatgttaaacgtgcgagtgtttaacgggagttttagtttggagcggatggacgttaggtaggcggagtattttaagttttcggtttgtaggaattttttcggttcggtggattacgaagagttaattcgggatttggagaagtattgtagagatatggaagaggcgagttagcgtaagtggaatttcgatttttagaattataaatttttagagggtaagtacgagtggtaagaggtggagaagggtagtttgttcgagttttattatagattttcgcggttttttaaaggtgtttgtaaggtgtcggcgtaggagagttaggatgttagcgggagtcgttcggcggcgtttttaattggggtttcggttaattttgaggatacgtatttggtggatttaaagattgattcgtcggatagttagacggggttagcggagtaatgcgtaggaataaggaagcgatttgtaatcgacggtaatgatttttttttaattatagaatgtgtttggggtttcgttttgtttgttggagggtgttaattttagtttgtttttcggcgtattttgatttagttttgggagagttaattttattggttttaggtgtttagtgttatttggtttattgtttgtttgtttgtgatttttaagttagaaattggagatggtaagattcgataatttttttaatttaatatatcgcggttttttttattagtaatttttaggtatgtgataaagttgggatgtttattaacggttcgttttttggttagggaaagagttttggggcggagaatgtattttttgttttttgaaaataattttattttgtgtttttaaaagttattggggatgacggatttaggattgtgggtggaggtagtgggttttttattttttgattatggggttaatttttgttagttattgttttttttaataaagattgtgtgttttttttaaaaattttttttgcgtttaga

SEQ ID NO: 113 - DNA, 3486 bp, Artificial Sequence
  chemically treated genomic DNA (Homo sapiens)
tttaagcgtaggggaaatttttaaaaagaatatataatttttattagaaaaaataatggttggtagaagttggttttatagttaggggatgaaaaatttattatttttatttataattttggattcgttatttttagtggtttttaagggtataaaatgaggttgtttttaaaaaatagaaagtgtatttttcgttttagagttttttttttagttaggaggcggatcgttgataaatattttaattttgttatatatttaggagttgttagtgagagggatcgcgatgtattaagttagggaaattatcggattttattatttttagtttttgatttaaaagttataaatagataagtagtgggttaggtagtattgaatatttaagattaataaagttagtttttttaaagttaaattagaatacgtcgaaaagtaagttaaggttaatattttttagtaggtaaagcggggttttaaatatattttatggttgggaaagggttattatcgtcggttgtaggtcgtttttttatttttgcgtattgtttcgttaatttcgtttggttgttcgacggattagtttttgggtttattaaatgcgtgtttttagagttagtcggagttttaattaaaggcgtcgtcgggcggttttcgttgatattttggtttttttgcgtcggtattttgtaggtatttttggggggtcgcgggggtttgtagtagaattcgggtaagttgtttttttttattttttgttattcgtatttgttttttaggggtttgtgattttgaaaatcgaaattttatttgcgttggttcgttttttttatgtttttgtagtgtttttttaagtttcgggttaatttttcgtggtttatcgggtcgaagaggtttttgtaggtcgagggtttggggtgtttcgtttgtttggcgtttattcgttttaggttagggttttcgttagatattcgtacgtttgatatttttttttcgggtttgtacgatcgtttttttcgtatttttaaaaaaataaaatcgaataaaataaagcgtttttacgtagttcgaatttttttcggaagtttagcgattgttttcggagttaaaagatatagatttcgacgagttacggttcgagttttaggagcgcgtaggggttgcggggaagtttcggttcggtcgtcgagttttcgttgattaaatggattggcgagcgggagggcggagaggagaggggattaggtaagcggagagggtggtaaagttcgttcgagtttgggcgggtgtaagttcgcgggtttcgcgaatttagtcgttttttaaattttgtcggcgtcggagtcgtagagtcgtgagtaagcggggataggggagggggagaaaaatatttcgaaaagacgagttttttttttttagtggtttaatatggcggtggaagggaggttgacgaagaagaaaatgattgatacggcgagtttatttaaatagaggaggagatttattggttgcggcggcgggagtcgtttcgtcgaggttggcgagcgcggttttaaggtggtttcggcgcggtttcgttattttttttcgttttcgagcgcgtcgttttttcgagcgtcgtcgggagattggttggtcgcgtgattgttggaggggtattgttgttaataaatttgttttggttggtttcggagaaattaaaattaagataaataaattagttaaacggtcgggaatttggggcggggtttgaggttcggggttcggcgttgcgttggcgggttcgtcgcggcgtttaagtttcgatttttttttcgtttttcgttcgggaagtcgggatttggattagaggatcgcgaaggtcgtcggtagttcgttaggagtcggggtggcgagttgtttttagttcggttttttttagcggtttttatttcgtggtttgcgggggaggtcgcggagcgtttgttgggggggttgggcgttttttcgtcggcgtgtttttgttgggggttggtggaggtagtgggtaatggttcgtttagttttaatttagaagtttttgttatttttggggaggttgggggtttagggaagaagttaaagcgaacgttttttttttagaaattagttaggagtagacgcggtatttattatgaatttaagtttttttttaatgaaaataagaaaggaatttaagattaaaaaaaaaaaataaaaaattttagttttttaagttttttaataaattttgtagttgttttagatacgtttagttttgaaaaacgagggtatatttttggtttaggatttttttttttaagtatagttaaggttatggatattggttgcgtgtgggaattcgtttttttttatttttttgttttttttcgggattgtagtagttttttttatttgagtttagtcgttaaatataatagtttttttttttttttattttttttttttattagattttattgttttaataaatttagaataatatttagatgttagtgaatgtttttagagggttgaagggtgaaaatatttttttcggggttaaattttagatgatgaaatgatttttaaaatattataattatgttttaacgttcgatattagtattttagcgtttttttttttttttttgtagttggaaattttttttttagtgtgggtttgagtatcgtggtggaaggtaaagtaggacgatgagtagggttgttttgagataaagtttagtggatttttaattgtttttttatttttatgttcggtatttattattttggtttgagttaaagttaatgtattttattggaaattaatttttcgttttaatattatatagtagtaaagtttttttaagtatttatgttatagatgagtttgatgtgtagtttgtttttttagttatattttgtttattttgtgtgtttattttattttatacgttttagaatgtgatagttggaagggattttcgggattttgtggtttaatttttttttttttattacggaggaaatcgagatttagagaggttttttgtttagggatatgtattcggttggtatcggagttaggattagatgtaagttttttaatatttaggttggtttattttttgttttttttttttttaatggtttttattggtttagggttttgtttgagtttgattgtgttgtagtttgtaggttttgttgttttataagtgattgaaaatggtttttttttaggttttgggttgtttgtagatgtttttttgatgtggtttgtggttattgatatttaaatgtagttgttttgagtttgtggtattattatttattagtttaattaaaattgaaggataggggttgatatttagagaatagtaaagggggtagtgtttagaattagtttttaagttaggattttttatttaattgatagaaaagaatttatttaggattaagtaagaggttttattttttttagtt

SEQ ID NO: 114 - DNA, 8666 bp, Artificial Sequence
  chemically treated genomic DNA (Homo sapiens)
ttgtagggttttttttagtttaaagaaagtaattaggtgtttttattgtgttatgatttttatttttagttgggttttttagtttggttttaaagaataaaataaaaggtttttttgtttgagttttatttaatttattttttttatttataagaggtattttaaatttttacgatttttaaattttttaatcgattattttatttttattttgtaaataagttaatttttttatttatagaaggaagtgttttaatttttttttcgttttgatttttttttttttttaaatttatgtattttttgtgataaaatttataattatcgttgtattttgagttttatttttttattatttttgagggattttaagtttttaaaaatattttattttgtttgtgtatttaattttttttttatttttttttaatttttttttttttttatttggtatttgtttttttaggtatatgtgtgtttaggttttttttattttttatttgttttattttatggtatagggttttgaattattataattaagttatgaaagagtagttaacgtagtgtttttatttttttgttattttattattttagttttttttttggttttttgaggagttttttataggttggtttttaggaataagtttaaatgaattatttttagtttttttaaatttttatgtttttgtatatttttttatttttgtttagaatattttttttttttttttttatttttaaatttttatattattttttaagattgggattagtttttagtattcggaagtttttgtttattagagataaatgagaatgagtttggttatttttttatttttttgtattattttgtgttttattttgtttttttaagagtattatatgttttatttaatttttaaataattgtttgaggtaagtatagttattattttaattatgtaaatgagaaaatagaggtttagatatgttgagtaattttgataaaagttaaagaattaataagtggaatagttgaggtttgaattttggtagtttgattgtagagatattatgtttgatttatttttttttgtttttattttatgtttgtttttagtttttgagtttgttgaatgaatgaataggtggtagtttttttttgttataagattgattagaattaagataggtttaaattttacgtgtagaatttttaaaattgtaaaggtagtgtaaatttaaaaaaagaatggtatttttaggaaagaggaaaagtaagtgtgagaataataataataataattaataaattttagtaaatttagtaaatgtagtaaatttttatattaaaagtttttggatatatattattatattttatggttatatgaaatatattataattttattttgtatataggaaatttgagattggtataaggagtatagagatttaggattttatatttttatttttttaggattttgtattttaggtcgatatgtatgagtaaattgggagtataatgggttttttaatagaaaaattaggaaagtttttttattattattaattatttatataatatttttttaattttattattatttatattttaagttttagagtatatgtgtataatgtgtaggtttgttatatatgtatatatgtgttatgttggtgtgttgtatttattaatttattatttagtattaggtatattttttaatgttatttttttttttttttttttatataagatttataatggataatggattttaatttttagagtaaaatggttttatttaaggatgttataatttttttagagttttattgtaagatatgagatatatatatttaaaatttgtttttggtatttttaaagtagttaatttttatatttgtttataatgtatttaaatgttgtttttatatggttgtattttttattttttttattaatagttatatatattttttataagagttgaaagagtttttgatgtaggaatttatggtagagttttagagaaatttttgaatttattgaaagttttatttagaaatatatgtgtaagtgaatatattttttttaaaaaaaattattatttatttttttttttgagaagaaggtatttattttaatagatttttgaaggagtttattttttttatttttttatttttattaagaattattgtaggtcgggtacgatggtttatgtttgtaattttagtattttgggaggttaaggtgggtggattatttgaggttaggagttcgagataagtttagttaatatagtgaaatttcgtttttattaataatataaaaattagttgggtatggtagtatgtgtttgtaattttagttattcgggaggttgaggtaggagaattgttcgaattcgggaggcggaggttgtagtgaatcgagagagatcgtgcggtgttattttattttagtttgggtaatagagcgaaattttattttaaaaaaatatataaaataaataaataaaaagaaagaattattgtattagtgatggaaatgtgtttttttttttttattttggtaattatttttttttttttttattataaaatattttaaattaaattaaaataattttatttatcgatagtttgaattttttttattattgttatatagttaattgagaggtatttcgaggaaaatataaatggtatagtaatgtattgtagattttaataatatatttgatattttaaattgtttttattggttttattttaaaaattatatgttttaaaattaagtagatattaaaagtataagatatattgggtttataaggtttaagttaattagggattgaaatataatttttaaatagagttggattatttagtaggtagattaagtatgtgtttaaggtattagtaaagtttgagtaatttattttttaaaacgtagtatatgtttttgataagtttaaaaagtagtagttataggaaaaattagaatttttatttttttgcgtttgttatattttttagtgttgtttaatttttttttgtaagtgagggtggtggagggtgtttataatttttttagggagtaagttttttttggttttttttttttttttttttttttttttttttgagattaagtttcgtttttgttttttaggttggagtgtaatggcgcgatttcggtttattgtaattttcgtttttttttgggtttaagcgatttttttatattagttttcgagtagttgggattataggtatgcgttattaagtttcgttaattttgtattttttagtagagatagggtttcgttatgttggttaggtttgtttcgaatttttggttttaggtgattcgtttgtttcggttttttagaatgttgggattatagacgtgagttatcgtattcggattttttttttatgtaatagtgataattttatttaaagtatttttttttttttttgagtcggagttttattttgttatttaggttggagggtggtggcgcgatttcggtttattgtaatttttgtttttcgggtttaagcgatttttttgttttagttttttgagtagttggaattatatacgtgcgttattatggttagttaatttttgtatttttagtagagacggggtgttattattttggttaagttggtttcgaatttttgattttaggtgatttgttcgtttcggttttttaaagtgttgggattataggtgtgagttatcgcgttttgttttaaagtattttttttttatgttttaaaataagattgtaagttagtttttaaagcggataatttaagagttaataggtattagtttaggatgtgtggtattgtttttaaggtttatatgtattaatatattatttaaatttataataatttttataaagtagggggtatttatatttttttttttttttataattacgaaaaatgtaaggtatttttagtaggaaagagaaatgtgagaagtgtgaaggagataggatagtatttgaagttggtttttggattattgtgtaattttgtttttagaatattgagtattttttttggtttaggaattatgattttgagaatggagttcgtttttttaatgattttttttttatttttttatttgtttataggtagaattttttttcgttcgtattaaataaattttatttttttagagtttgtttttatattaggtaatgtatacgtttgagaaatttttgttttagatagtcgttttatacgtaggaggggaaggggaggggaaggagagagtagttcgattttttaaaaggaattttttgaattagggtttttgatttagtgaatttcgcgtttttgaaaattaagggttgagggggtagggggatattttttagtcgtataggtgatttcgattttcggtggggtttttataattaggaaagaatagttttgtttttttttatgattaaaagaagaagttatattttttttatgatattaaatatttcgatttaatttggtagttaggaaggttgtatcgcggaggaaggaaacggggcgggggcggatttttttttaatagagtgaacgtatttaaatacgtttttgttggtaggcgggggagcgcggttgggagtagggaggtcggagggcggtgtggggggtaggtggggaggagtttagttttttttttttgttaacgttggttttggcgagggttgttttcggttggtgttttcgggggagatttaatttggggcgattttaggggtgttatattcgttaagtgttcggagttaatagtatttttttcgagtattcgtttacggcgtttttttgtttggaaagatatcgcggtttttttagaggatttgagggatagggtcggagggggttttttcgttagtatcggaggaagaaagaggaggggttggttggttattagagggtggggcggatcgcgtgcgttcggcggttgcggagagggggagagtaggtagcgggcggcggggagtagtatggagtcggcggcggggagtagtatggagttttcggttgattggttggttacggtcgcggttcggggtcgggtagaggaggtgcgggcgttgttggaggcgggggcgttgtttaacgtatcgaatagttacggtcggaggtcgatttaggtgggtagagggtttgtagcgggagtaggggatggcgggcgattttggaggacgaagtttgtaggggaattggaattaggtagcgtttcgatttttcggaaaaaggggaggttttttggggagtttttagaaggggtttgtaattatagatttttttttggcgacgttttgggggtttgggaagttaaggaagaggaatgaggagttacgcgcgtatagatttttcgaatgttgagaagatttgaaggggggaatatatttgtattagatggaagtatgttttttattagatataaaatttacgaacgtttgggataaaaagggagttttaaagaaatgtaagatgtgttgggattatttagtttttaatttatagatatttggatggagtttattttttttattaggagggattattagtggaaatttgtggtgtatgttggaataaatatcgaatataaattttgatcgaaattatttagaagcggtcgggcgcggtgttttacgttttgtaatttttttattttgggagattaaggcggggggaattatttgaggtcgggagttcgagattagtttggttaataggtgaaatttcgtttttattaaaaatataaaaagtagtcgggggtggtggtaggcgtttgtaattttagttattcgggaggttgaggtaggagaatcgtttgaattcgggaggttgaggttgtagtgaatagcgagatggagttattttattttagtttgggtgatagagtgagattttgtcgaaagaaagaaagagagaaagagagagagaaaaattatttagaagtaattatatattgtgtttatttttaattgagtagggtaaataaatatatgtttgttgtaggaatttaggaaataatgagttatatttatgtgattattttagaggtaatatgtagttattattttgggaatatttgttaatatttttgtttttttattatttttagtttatttgatatagtttatttgtgataagagtttttaattttttatttttgaatagaggtgttttttttttttttatttttgttttgtgagggagttaggggaggatttaaaagtaattaatatatgggtaatttagtatttttaaaattttgttaatagtttgaattcgggagtttggttttgtagttttataatattttagaagagattttatttgtttaaaaataaaaaggaaaaagaaaagtggatagttttgataatttttaatggagaagggagaagaatatgtagaaaaggggaaatgatgttggtttagaattttaattatattggtgtttaatataggaatatttatttatataatattttaaagtattaaatttatattagtatattattaaatggatatattattaaatgggtttaagtattttatatattttaatttaattgatttattttttttttgttttggatttttattatgatttaaatatttatatatgggttattttttagattttttatattatgaaatataagaaaaatttttaaggttagttttatgattaagacgaaggattttattgaatatataaaataataaatatattgtaatattttgtttttttttttgtagttgtaatttggtttgtttatattttttttttgtttttttgaaaattgagttagttttatttttttaggataggatttaataattataatataatttagtataattttttgatttaggtaaattatgtaatttgtgtttagtatgaaatgtatttaaaaataagtaatttttttttaatattattatttttaaattaatataataaataatagttattttaaaataaattgtttatttttattatgtagtatttaaattttaaggttgttatgattgtagatagtattttaaaatttttttttggaaatggttttgtttttaagatgatttaggaattaaagaggtgattattttttgtttaatgaatttttaaattataaatttgggaagtgttttagttttttattgttgttgttataaattattataaatgtgttagttaaaataaatataaaattattattttatagttttagagattagaagttaaaaatgggtttataaggttttattttttttggaaattttaaggggtaatttgtttttttgttttttttagtttttagtgattattaaattttttggtttatggtttttgtattttttttgtggtttgtgtttttatttttgtattttttttttgattgtgattttttaataaaaatatttggggttatgttgggtttattttgaaaattttggataattttttttaagattattaattaaattatatttgtaaagttttttttgttatataagttaatgtattaaaagtttttgaggattaggatatagatattgggggtgggggggtattatttagtttattataggaaggaattttagggttaattaaattagtttttttattttatatttgaagaaattgaagttttggaattggagagtattatgttaaatgaaataagttaaatatagaaagataaatattatatgtttttatttatttgtgaaatataaaataattatatttttagtagtaaagagtagaatggtggttattagagttggggggtgggaggaatggggagatggtaattaagatataaagttttagttaagatgggaggaataagtttgattgttttttttgagatgtgttttatagtatgatgaatatagttaaatagtaaattttaaatgtttttatttgataaaaatgttaaatatttgagatgatggataggttatttagtttgatttaataattttttattgtgtttaaagattataattttatattgtattatataaatatatataattgtattattttaatatataattttaaaattaatataatgaaaaagaaattgaagtttaatatttttagaagttaagtgtaatttaaaagttttgtgagaatttgttttaataaataaataagttttttttttttaataattattatattttgcgtttggatatatagtagtgaataaaaaaaaaaaaaaaaaaaaaaatttttaggtttaatataattttaggaagaaattttagtagttgtattttaggggaaatataggaagttagtttggagtaaaagttagtttgtttttgtttttttgttattttgttcgtgttttatagtgttttttgtttgtgacgatagtttcgtagaagttcggaggatataatggaatttattgtgtattgaagaatggatagagaatttaagaaggaaattggaaattggaagtaaatgtaggggtaattagatatttggggtttgtgtgggggtttgtttggcggtgagggggttttatataagtttttttttcgttatgtcggtttttattttggttttgattattttgttttttttggtagg

SEQ ID NO: 115 - DNA, 8666 bp, Artificial Sequence
  chemically treated genomic DNA (Homo sapiens)
tttgttagagagaatagaatggttagagttagggtgggggtcggtatgacggaaaggaagtttgtgtagagtttttttatcgttaagtagatttttatataagttttaggtgtttaattatttttatatttgtttttagtttttaattttttttttgagttttttatttattttttagtatataatgaattttattatatttttcgaatttttgcggagttgtcgttataggtagagagtattgtgaggtacgggtaaaatagtaaaggggtagggatagattgatttttattttaggttaattttttgtattttttttgagatataattattgaaatttttttttgaaattatgttaggtttggagatttttttttttttttttttttttgtttattgttgtatatttaagcgtagaatgtggtaattgttaaaaagagaaaatttgtttgtttgttaaaataaatttttataaaatttttaagttatatttagtttttgggaatgttgaattttaattttttttttattatattagttttaaaattatatattgggatagtatagttgtatatatttatgtggtataatatgaagttatgatttttgaatataatggggaattattaagttaagttaagtaatttatttattattttaaatatttgatatttttgttaaatgagagtatttgggatttattatttagttatatttattatgttatgaaatatattttaaaaaaaataattaaatttattttttttattttaattgaggttttatattttgattattatttttttattttttttattttttagttttagtaattattattttattttttattgttaagaatgtaattgttttatattttatagataagtgagaatatgtgatatttgtttttttgtgtttggtttattttatttagtataatgttttttaattttaaaattttaatttttttaagtataaaataagaaggttagtttaattaattttaaaatttttttttgtggtaggttgaataatgtttttttatttttaatgtttatgttttaatttttaaaaatttttaatatattaatttatgtggtaaaagaggttttgtagatgtgatttaattaatggttttgagggagattatttagaatttttagggtgggtttaatataattttaagtgtttttattagagggttatagttagagagaagatataagaatggaagtataggttatagagaaaatatagagattatgagttaaggaatttgatggttattagaagttggaaaagataaggaaatagattgttttttagagtttttaaaaggaatgaaattttgtggatttatttttgatttttgatttttagaattgtaaaataataattttgtgtttgttttagttaatatatttgtgataatttgtaatagtagtagtaggaaattaaaatattttttaggtttatgatttgagagtttattaaataagagatggttatttttttggtttttaaattattttggaaataaagttatttttagagaggaattttaaaatattgtttgtagttatagtaattttaaaatttgagtgttgtatggtggaagtagataatttattttaggataattgttatttgttatattagtttgaggatggtggtgttaaagaggagttatttatttttaggtatattttatattaaatataaattgtataatttgtttaaattaaggaattatattaaattatattatggttattaaattttgttttgagaaagtgaaattgatttagtttttaaagagataaagagaaagtataagtaaattaaattgtagttataaaaagaaagataaaatgttgtagtatatttattgttttgtgtatttaatgaagtttttcgttttggttataaaattagttttaaaggttttttttatattttatagtatgaaaaatttaaaaagtaatttatatgtaaatatttaaattatgatagaaatttaaagtaaaaagaaaatgaattaattgaattaaaatgtgtaggatgtttaaatttatttgataatatatttatttgataatatattaatatgaatttagtattttaaaatgttatataaataaatgtttttatattaaatattaatgtagttaggattttaagttaatattatttttttttttttatatgttttttttttttttttattaaaaattgttaaaattatttattttttttttttttttttgtttttaaataaataaggttttttttaagatattgtaggattataaagttaaattttcgggtttaagttgttggtaaaattttagagatgttaagttatttatgtattaattatttttaaatttttttttaatttttttataaaataggagtagggagaggagaaatatttttgtttaaaaatgaggaattgaaaatttttattataaataaattatattaagtaagttaaagatagtaaaagagtaaaaatgttagtagatatttttaaaatggtaattatatattatttttggaatgattatatgaatgtggtttattattttttaagtttttatagtaaatatatatttatttgttttatttagttaaaaataaatataatatgtagttgtttttgaataatttttttttttttttttttttttttttttttttcgataaagttttattttgttatttaggttggagtgaagtggttttatttcgttgtttattataattttagtttttcgggtttaagcgatttttttgttttaatttttcgagtagttgggattataggcgtttgttattattttcggttattttttgtatttttagtagaggcgaggttttatttgttggttaggttggtttcgaattttcgattttaggtgatttttttcgttttgattttttaaagtgaagggattataaggcgtgaggtatcgcgttcggtcgtttttgaataatttcgattaaaatttatattcgatatttattttaatatatattatagatttttattgataattttttttagtaagaaagataagttttatttaggtatttgtgaattggaggttaagtagttttagtatattttatatttttttaagattttttttttattttaaacgttcgtaaattttgtatttgataaagagtatatttttatttaatataaatatgtttttttttttagatttttttagtattcgagagatttgtacgcgcgtggttttttattttttttttttggttttttaagtttttagggcgtcgttaggaggaggtttgtgattataaattttttttgaaaattttttaggaagtttttttttttttcggagaatcgaagcgttatttgattttaatttttttgtaaatttcgttttttagagtcgttcgttattttttgttttcgttgtagattttttatttatttggatcggttttcgatcgtaattattcggtgcgttgggtagcgttttcgtttttagtagcgttcgtattttttttattcgatttcgggtcgcggtcgtggttagttagttagtcgaaggttttatgttgtttttcgtcgtcggttttatgttgtttttcgtcgttcgttgtttgtttttttttttttcgtagtcgtcgagcgtacgcggttcgttttattttttggtgattagttagtttttttttttttttttttcggtgttggcggaagagtttttttcgattttgttttttaaattttttggagggatcgcggtatttttttaggtaaggggacgtcgtgagcgagtgttcggaggaggtgttattaatttcgagtatttagcgaatgtggtatttttgaagtcgttttaggttgggtttttttcgggggtattagtcggaagtagttttcgttagagttagcgttggtaaggaaggaggattgggtttttttttatttgttttttatatcgtttttcggtttttttgtttttagtcgcgttttttcgtttgttagtaaaggcgtgtttgagtgcgtttattttgttaaaaagaaattcgttttcgtttcgtttttttttttcgcgatataatttttttaattgttaaattgaatcggggtgtttggtgttatagggaaagtatggtttttttttttaattataagaaaaagtaaaattatttttttttagttgtgagagttttatcgagaatcgaaattatttgtacgattagaaagtgtttttttatttttttaatttttgatttttaggagcgcggggtttattaagttagaaattttagtttaaaggattttttttggagagtcggattgtttttttttttttttttttttttttttttgcgtgtaaaacggttgtttggggtaagggttttttagacgtgtatattgtttggtataagagtagattttgaaaagatgaggtttatttaatacggacgggggagaattttgtttgtaggtagataggaaaatggggagggagttattggaaggacggattttatttttaaagttataatttttagattagaaaaagtgtttagtgttttagaagtagagttgtatagtgatttaaagattagttttaaatattgttttgttttttttatattttttatattttttttttttattgaaaatattttgtatttttcgtaattataaagggggaagggaatatgagtgttttttgttttataggggttgttgtgagtttaaatgatgtattaatatatataagttttaagaatagtgttatatattttaagttaatatttgttagtttttgaattattcgttttgaggattggtttgtaattttgttttgaggtatagaaagaaaatgttttggagtaggacgcggtggtttatatttgtaattttagtattttgggaagtcgaggcgggtagattatttgaggttaggagttcgaggttagtttggttaaaatggtgatatttcgtttttattaaaaatataaaaattagttggttatggtggcgtacgtgtgtaattttagttatttaggaggttgaggtaggagaatcgtttgaattcgggaggtagaggttgtagtaagtcgagatcgcgttattattttttagtttgggtgatagaatgagatttcgatttaaaaaaaaaaaaaaatgttttggatagaattattattattatataaaaggaaagttcggatgcggtggtttacgtttataattttagtattttgggaggtcgagataggcggattatttgaggttaggagttcgagataagtttgattaatatggcgaaattttgtttttattaaaaaatataaaattagcggggtttggtggcgtatgtttgtaattttagttattcggaggttgatgtaggagaatcgtttgaatttaggagaaggcggaggttgtagtgagtcgagatcgcgttattgtattttagtttgggagataagagcgaaatttggttttaagaaaaaaagaaagaaagaaagaaagaaagattaagaagaatttattttttgaaaagattatgggtattttttattatttttatttataaagaaaagttaaatagtattaaagagtataataagcgtaaggaggtaaaagttttaattttttttgtgattattattttttaagtttattaaaaatatgtattacgttttaaaaaatggattgtttagattttgttgatgttttaagtatatgtttaatttgtttattggataatttagttttgtttaaaagttatattttaatttttggttgatttaaattttgtagatttagtatattttgtatttttagtgtttgtttgattttaaaatatgtagtttttaaaatgaagttaatgaaaataatttgggatgttaagtatgttattaaaatttataatgtattattgtattatttatatttttttcggggtattttttaattagttgtgtagtaatgatagggaaaatttaaattatcgataaataaaattattttagtttagtttaagatattttatgatggaggaggaagaaagtggttgttaggatgggagggagggaatatatttttattattaatataatggttttttttttttgtttgtttgttttgtgtgtttttttgagatggagtttcgttttgttgtttaggttggagtgaaatggtatcgtacgatttttttcggtttattgtaattttcgtttttcgggttcgagtaatttttttgttttagtttttcgagtagttgggattataggtatatgttgttatatttagttaatttttgtattattagtagagacggggttttattatgttggttaggtttgtttcgaatttttgattttaggtgatttatttattttagttttttaaagtgttgggattataggtatgagttatcgtgttcggtttatagtggtttttaatgggggtgggagagtgggaagagtaggtttttttaagagtttgttgaaataaatattttttttttaaaaaagaaagtaggtaatgattttttttaaaaaagatgtgtttatttgtatatgtatttttagataaaatttttagtgaatttagggatttttttgaaattttattatggatttttatattaagaatttttttagtttttgtgaaaaatatatatagttattggtgaagaagatgggagatgtaattatataaaaataatatttggatgtattataaataggtgtaaaagttgattgttttggaaatattaagaataagttttagatatgtatattttatattttgtagtagagttttggaaggattatggtatttttgggtggggttattttgttttagaaattgaagtttattatttattataaattttatgtaggggggaggggggagggatagtattaggagatatatttaatgttaaatgatgagttgatgggtgtagtatattaatatggtatatgtatatatatgtaataaatttgtatattgtgtatatgtattttaaaatttaaagtataaataataataaaattaaaaaaatattatgtaaataattaataatagtgggaaaatttttttagtttttttgttaaagagtttattatatttttagtttatttatatatatcgatttgaggtgtaaaattttagaagaatgaaaatataaagttttggatttttgtgttttttatgttagttttagattttttatgtgtaaaatgggattataatatattttatgtggttataaaatatgataatgtatgtttaaaagtttttaatgtaaaaatttattatatttattaaatttattaaagtttgttggttattgttattattatttttatatttatttttttttttttttgagaatgttattttttttttagatttgtattgtttttgtagttttgaaaattttatacgtgaaatttaaatttgttttaattttgattagttttataataaaaaaagattattatttgtttatttatttaataagtttagaaattaagggtagatatggggtgggggtagaggggagtaggttaaatatagtatttttatagttagattgttagggtttaaattttaattgttttatttattggttttttaatttttattaaagttatttaatatgtttgggtttttgtttttttatttgtatgattaggataataattgtatttgttttaaatagttgtttagggattaaatgaagtatgtaatgtttttagaagagtaaaataaagtatagaatgatataagaaaatgaaaaggtgattaaatttatttttatttgtttttagtaggtaaaggttttcggatgttgagagttgattttagttttgaagaatgatgtgagagtttaaagatggaaaagaaggagaaagatattttaggtagaggtaagaggatgtgtaaaggtatagaagtttaggaaaattgaaagtaatttatttagatttatttttgaaaattagtttgtgaaggattttttagagagttaaaagaaaaattaggataatgggatggtaaggaagtggggatattgcgttgattatttttttatagtttggttgtgatagtttaaggttttatgttatgaagtgaggtagatggaaggtggaggagatttgagtatatatatatttggaagggtaagtgttaagtgaagagaagggaaagttagaaaagaataaaagaaaagttaagtatataggtaagataggatatttttgaggatttgaggttttttaaaaataatgaagaaatagaatttaaagtatagcggtggttatagattttgttataagagatatatagatttgggagggagaaaaggttagaacggggaggaagttgaggtatttttttttatgaatgaggaggttagtttgtttgtagagtgaaaataagatggtcggttaggaagtttgagaatcgtaaaggtttggaatattttttatgagtagagaggatgggttgagtaagatttagatagagaagttttttgttttgttttttaaaattagattggagaatttagttgagggtggagattatgatatagtagggatatttgattattttttttaaattaaagaaagttttgtag

SEQ ID NO: 116 - DNA, 2501 bp, Artificial Sequence
  chemically treated genomic DNA (Homo sapiens)
gaaaattaggttgagtaggttggttttttaaagaaatttattgagtttttataatgttttttttatttgacgggagaaaaggggttttggaagattaagtgtgaagttttagaattttgtttggagttggttaggattatttaggtttgagtataagtaaagcgttgttcgtggtgttagtaagcgcgaatgttttcggtaacgttttttttatttaaagttgttttttatttagttaatttgtttcgcgaagtttatatatttgtttcgtgtaagatttttagttattttatttagttattggttttttttttattattattttttatgttttttttaaagaaaaatattattttttatttttttattaattttaaatagtttttatttttttgatatatttattatttaagaaaatggtttaagaattgggttagattattttgttttaatttttttgataagttttagagaaatttaaaggttaaaataagagtataagagtaaaaggtagagaaattaagaaattgaagattaggaaatgggggttggatgggaaagaaaaagaaattgttattaatgttattcggtttttttttttgtttaggtggattttagttttgttgaggttttgttagtagatttttagttttaattagtatttttatggtggtggtatttttattgtttttaaaagaaagagttttttttaattttatagggatttgggggatgaggagttagagttaaggtattttaaaaaaaatatgtgaagatttttattttgtaatatataagtaattgtttttttgttaagattttgttttttttagtatttcgaattaaaatgattttgtaaataaaaattgtttatttttaggagaggtttatttatgtagttttttattaaagtttttaggtaataaatttataatttgcggttttttttttatttaatgtagtattcgttgaaatgttttaaatattttaagtaataaatgttgatttaaatttatttaggaagattaggaaggggaaaaaaagtatttggtatttaaatttttagaagagaatttaatgataggtttagtttgtttaatgataagtttagtattatattttttttttatgatgttttattattattgtataaattttttttattatttatgataaataaaaataagatatttgataaagtgggtttaaataggtaagagtgtaaataaagatttattgtataaatatgatgaaattgggattttagatttttaaagtataatttttttttgttttatgtgtgttaggttgttatttttaatttcgaattagttttttttttttttaagggttgtatttataatgtaaaaatggaaagaattaaaaagtatacgtaaaatatgattttcgggatttttttttatttttatggttgattaatttaaatagaaagatatatttaagagaaaattgttaagtttgatataagttatgaaatttgtgaagtttaagtattgtttggggatgaatttaatttgtatgataggtgtagagttgtcgtttttagatattttaagaaatacggagttattttgaatgattttttttcggttataagggagttattaacgtttttatagtgaaattaattggttggttgaaggaatagaaattttttgtttcgtttattggggattaggagttgagggtagtggtgaatatttttaaaatattagttttggttttattggatatttagcgagtagtgtagttagtatttttggcggttttttggtttagtttttggcgtatgcgttttagtatttttgggtaggttttttcgttttcgtgacgcgtcggttcgggtttggtttttcggcgattatagcggatagggggcggagtttaagggggtggggagacgtcggttttttggtttagttgaaaacggaattttttgtcggttggttttttattttgttagagcgaggcggggtagtgaggatttcgcgacgcgttcgtattttgcggttagagcggttttgagttcggttgcgttcgcgttaggcgtttttttttagaagtaatttaggcgcgttcgttggtttttgagcgttaggaaaagttcggagttaacgatcggtcgttcggttattgtacggggttttaagtcgtagaaggacgacgggagggtaatgaagttgagtttaggttttttaggaaggagagagtgcgtcggagtagcgtgggaaagaagggaagagtgtcgttaagtttacggttaacggtggattattcgggtcgttgcgcgtttgggggttgcggaatgcgcgaggagaataagggtatgtttagtgggggcggtagcgatgagggtttggttagcgtcgcggcgcggggattagtggagaaggtgcgatagtttttggaagtcggcgcggattttaacggagttaatcgtttcgggaggcgcgcgatttaggtagttggggttttagggt

SEQ ID NO: 117 - DNA, 2501 bp, Artificial Sequence
  chemically treated genomic DNA (Homo sapiens)
gttttggggttttagttatttggatcgcgcgtttttcgaaacggttgatttcgttgggattcgcgtcggtttttaggagttgtcgtattttttttattagttttcgcgtcgcggcgttggttagatttttatcgttgtcgtttttattgggtatgtttttgtttttttcgcgtatttcgtagtttttagacgcgtagcggttcggataatttatcgttggtcgtaaatttaacgatatttttttttttttttttacgttgtttcggcgtatttttttttttttaggagatttgggtttagttttattattttttcgtcgtttttttgcggtttggggtttcgtgtagtggtcgagcggtcggtcgttagtttcgggttttttttggcgtttaagaattagcgggcgcgtttggattgtttttgggaaaaagcgtttagcgcggacgtagtcgagtttaaagtcgttttggtcgtagggtgcggacgcgtcgcggagtttttattgtttcgtttcgttttggtagagtggggagttagtcggtaaagaatttcgtttttagttgggttaaggggtcggcgtttttttatttttttaggtttcgttttttgttcgttgtgatcgtcgggaggttaggttcgggtcgacgcgttacgagggcggggaagtttgtttaaagatgttaggacgtatgcgttagagattgggttagggagtcgttaggaatgttggttgtattgttcgttggatgtttagtaaagttaaggttaatattttgggaatgtttattattgtttttagtttttaatttttagtaggcggagtagaggatttttgtttttttagttagttagttggttttattgtggagacgttggtggtttttttgtgatcgagagaaagttatttaaaataatttcgtgttttttaagatgtttgaaagcgatagttttgtatttgttatataagttaaatttatttttaggtagtatttgggttttataagttttataatttgtattaaatttagtaatttttttttggatgtgtttttttgtttgaattagttaattataaaaatagagaaaaatttcgagaattatgttttgcgtgtgttttttaattttttttatttttgtattatggatataatttttaaaagagaaaaaaattagttcgagattgagagtggtaatttggtatatataagataaaaaaaaattatattttaagaatttgagattttagttttattatatttgtatagtaaatttttgtttgtatttttatttatttaaatttattttgttaggtattttatttttatttattatgagtaataaaggaaatttatgtagtaataatgaaatattataagagaggggtgtggtgttgggtttgttattaaataggttgaatttgttattaaatttttttttgaagatttaaatgttaagtgtttttttttttttttttaatttttttaggtgagtttgaattaatatttattatttaaaatatttaaaatattttagcggatgttatattggataggaagagaatcgtaagttatggatttgttgtttaaaaattttggtgaggaattgtataagtggattttttttaaaagtgaatagtttttgtttatagaattattttggttcggagtgttgaggaagataaagttttaataggagggtaattgtttgtgtattgtaaaatgagagtttttatatgttttttttaggatattttagttttgattttttattttttaaatttttgtagaattaaaaaaagtttttttttttaaaggtagtggaagtgttattattatggaagtgttggttagggttgaaaatttattgatagagttttaatagagttgaaatttatttggatagggaagggaatcgggtagtattaataataattttttttttttttttatttaatttttattttttagtttttagttttttaatttttttattttttatttttatgtttttgttttgatttttgagtttttttgaaatttattagaaaagttaggataagatagtttgatttaatttttgagttatttttttaggtagtaaatatgttagaaaaatgaaagttgtttggagttgataaggaaatggaagataatgtttttttttgagggggatataaagaatggtgatagggaaagaattaatgattaagtaaaatgattgagaattttgtacgaggtagatgtgtgagtttcgcgaagtaagttgattgaatgaaaaataattttgggtagggaaaacgttgtcgggggtattcgcgtttattagtattacggatagcgttttgtttatatttaggtttgggtggttttaattagttttagatagaattttaaagttttatatttgattttttaaagttttttttttttcgttaaatagaaaggatattatggaagtttaatgaatttttttgaaaaattaatttgtttaatttggttttt

SEQ ID NO: 118 - DNA, 2501 bp, Artificial Sequence
  chemically treated genomic DNA (Homo sapiens)
gtgttttagtttttgaatttatgttgttcgttattatattgtattgtttgtggatgatttatttgtttttgtagttttatttgaagaatttttttttttttttttttgaggtttgttttaaatattattttttttgtgaagattgtttggtgttttttaggagagagtgtgatttttttttttaggaatggtagtattttaaatatatatattttgtagtatattttattttgtatggtaatggtttgtttgtgagttttatttcgtattagagggtgagggttttgaagatagcgttaggttttatttatttcgatattttataatatttattatatgtttgatgaatgaatgtatagggggatggttgggtgtattttttttaattttttaattttttgaaataaataataaaattttatttttttttagaagttttggtatggttttttttattttgttatagttattgataattatttttattttttgtgtaatttattaggtaagaagtttatgtagatttatttttagtagtttatatgataaataaatattgcgtttgatttttaaatattaaattatagtatattatagatagatatagagttattatttaaagtatgatattttaattttaaaaggttttttttgaagaatattataaattttttttttttttaagatttgttgggtaggaaagatgggagaaaatgaattaatgtttatatagaaaggaggataatgggggtaaaaataatagatgaacgtatgggtggatgagagaatggataaaatgataggtggatatgttgattttggatagatgggaaatgagtggatatattaataaatagatatgtgggtggatgggtggagaagaggatggtggatggttgtggttttatgaagagatgtgaaaaaggaagtgtggaatgatggatgagaagttgtatgggaagatgaatagaagaataggtggttgaataaattaaaaggtgtgtggttggatgaatgaatgagtgggatgatagatggatttaagtggttagtggatggataggaggatggatggatgtgagagttttagaaggatataaggaaagatgggtggatagatggatgggcggatggaaggatatttaggaggatgaatgagtatgtgtgtggagagaggtgtttatttatattggtttgaatatatgggttagttgagttaaatgttagttttatgataggttattagtagttttttttgagttgttttgttaagaagttaaaatttatttaagttatgtggatttgttattgaggggaaaaagaatgagttttttttttttttatttggaagatttattaattttttattttttattttttattgtgggtacggaggtattgcgttatttagggtaagatttcgttttttttttagttttttttttaggatatttaatattttgtgaaatttagagattttgttttagtcggatttagagaaatttagcgggaaaggagaggttaaaggttgaatttaatggtgtaaggttttacggttcggttattttttgttttgacgtcgcggggttagcgggagaagaaagttagtgcgtttttgggcgtaggggttagtggggttcggaggtataggtatttcgcgatattttaggtttttcgatttacgtttttggtagtttcgattatttatagttttagtagagtacggggcgggggtagaggggttcgttcgggagggttgttattttttaaaatttttgcgggttgtttagttatagttttttttgtttgggtgtgtttttcgttcgtttttttttttcgttttaggttattgtttttaatttcgaataaaaattgtagttaattttcgaggtagttttattgtttagcggattttagtttttgttaggttcggttcgttattttcgtttcgtttttcgtcggtttttgtttcgcgtttagggattttttagtttttttcgttcgcgtttttcgttcgtttcggatattatggataagttttggtggtacgtagtttggggattttgtttcgtgtcgttgagtttggcgtagatcggtgagtgttcgtcgtagtttgggtagtaagatgggtgcggggtgtttagcgcggattcggcggtagttttttcggttgagtcggttttgggggattggagttaagtgagttgtttgcgaagtgtattgggtttcggaaagtagggttgggatttgcgttaaatcgttggagaatgtgtttgtggaagtattatttggttgaaagaaaaagagaaagagaagaaagtttgttgggtaggttgtcggcgcgtagttttgggcgaggtcgttagagttgtagtatatggtagaaagtaatcgttttttcggatgcgtatagtcgttgtttggattaataggtttttgtgtttaagggttcgttaagttttatcgggttgtgtttaggtagggtagagttgggcggggta

SEQ ID NO: 119 - DNA, 2501 bp, Artificial Sequence
  chemically treated genomic DNA (Homo sapiens)
tgtttcgtttagttttgttttgtttagatatagttcggtggggtttggcgagtttttgggtataggagtttgttagtttagataacgattgtgcgtattcgggagaacggttattttttgttatgtgttgtagttttagcgatttcgtttaaaattgcgcgtcggtagtttgtttaataaattttttttttttttttttttttttttaattaaatggtgtttttatagatatattttttaacggtttagcgtaaattttagttttgtttttcggagtttaatgtatttcgtagatagtttatttgattttagttttttagggtcgatttagtcggaggggttgtcgtcgggttcgcgttgagtatttcgtatttattttgttgtttaggttgcggcgggtatttatcgatttgcgttaggtttagcggtacgaggtagagtttttaggttgcgtgttattaaaatttgtttatggtgttcggagcgaacggagggcgcgggcgaaaggagttggaggatttttgggcgcggggtaggggtcggcggaggacgggacgaggatggcggatcgaatttggtagaggttggggttcgttgggtaatgaggttgtttcggaagttggttgtagtttttattcgaggttgaaaatagtgatttaagacggagggagggagcgagcgaaggatatatttaagtaaggggggttgtgattaagtagttcgtagaggttttaagaagtagtagttttttcgggcgggtttttttgttttcgtttcgtgttttgttgaggttgtaaataatcggggttgttagggacgtgggtcggggaatttggagtgtcgcggggtgtttgtgttttcgagttttattggtttttgcgtttagagacgtattggtttttttttttcgttggtttcgcggcgttaggatagaggatgatcgaatcgtaaaattttgtattattgggtttagtttttggttttttttttttcgttaaatttttttgaattcggttggagtaagatttttgggttttataggatgttggatattttgggagaggagttggagagagggcgaggttttgttttgggtggcgtagtgttttcgtgtttatagtggggagtgaggggtggggagttggtgaattttttaagtggaaagagggagagtttattttttttttttttaataataagtttatatggtttgaatgaattttagttttttggtagaatagtttagggaaagttattgatggtttgttatagggttggtatttggtttagttaatttatgtgtttaagttagtgtgaatgggtatttttttttatatatatgtttatttatttttttaaatatttttttattcgtttatttatttatttatttatttttttttatgtttttttggggtttttatatttatttatttttttgtttatttattaattatttaggtttatttattattttatttatttatttatttaattatatattttttaatttatttaattatttatttttttatttatttttttatataattttttatttattattttatatttttttttttatatttttttataaaattataattatttattatttttttttttatttatttatttatatatttgtttattgatatatttatttattttttatttgtttaagattaatatatttatttattattttatttatttttttatttatttatacgtttatttattatttttgtttttattatttttttttttgtgtaaatattaatttatttttttttattttttttatttagtagattttaaagagaggaagagtttgtaatattttttaggggaagttttttgagattgaaatattatattttgaatgataattttatatttatttataatatattatggtttaatgtttggaaattaaacgtagtatttatttgttatgtgaattattaaaagtaaatttgtatggattttttgtttggtgagttatatagaaaatgaaagtgattattagtggttgtggtaagatgaaaggaattatgttaggatttttgagggaaggtaagattttgttatttattttaagaaattgaaaagttgagagaaatgtatttagttatttttttatgtatttatttattagatatgtaatgagtgttgtggggtatcgaggtaaataagatttggcgttatttttagagtttttattttttggtacggaataaaatttataagtaggttattattatgtaaggtgaaatatgttgtaaaatgtgtgtgtttggggtgttattatttttagagaagggagttatatttttttttggagaatattaggtagtttttataggggaagtgatatttgaggtaggttttaaaggaaaaggaggaggaattttttagatgaaattatagggataagtaagttatttataggtagtatagtgtagtgacgaatagtatggatttaggagttagaatat

SEQ ID NO: 120 - DNA, 16579 bp, Artificial Sequence
  chemically treated genomic DNA (Homo sapiens)
tgttttttaaaatgatgtttagttgaattagttaatggagataaaaatatttatatataatttttttttaagtttattagttattttatagattagttataattttggttattttaatgagttaatttttttttagagatattataaattttttaaagatggaaaataattgttatttttttgaataatgtttattatttaaaataatgtatataaaagttgtttaataaatttttgttgaattgagagaaaatataaaaaattgaaagtagtttgtttgtaataagtgtttgttaagttttatagatttttttttttttttggaattattgtaataaatatttgatttttgatttgtaggattaaaatgtgattttttatattttaataggagtaagtattagttttgtaattttttttgttaatagaataaaaatggaatgtatgtttgttgtttttatatgtcggttgatatttatgttgaatattttttttataacgtagaggtttttttgttttttgttttgcgttttatttttgtttattatagagatattaatgatgttatgtgtttttttgtattattagtgtagtagtttttattatgttttttgtttcggttttattgtagtttaattaaataaatggaaacgggtagttattgaaaataaatagtaattgtaaaagttttgttttttaagaaattttttgtattgtatttcgttttgttttattgattttaagatttttatcgtttttttgtgtttagaaattagattttttagtttgttttgttttagttagataaatgttttataaaaatgatttatattttttagattgtggggagagaagaaaaagattttgagaaagtgattaaggagggagtaagagtgatataatttttgatttaatttagttggattgtgttttttatgtttttatttttttttttataaaaaagatagcgtttttgatgttttgttttaggtagttttttagggtgagtgtagatgtgttgagttatttggttgttttgaggatcggtttagagagtttttttttttattaatgaagttattttttttcggtagttcggttttttttattattttatgttggaatttggttttggtttgtatagttttgtcgtgatgtagatggttttttagttaagttttagagaaatttgtttaattatgaataggatatttatagtataggagaaaaaaaaatttattaaaataaatattttattgtaatattttgatttgggggttggagagtaaaaatttaatatttgatgtttgggaaaaatttaatgttttatggttttttaaggaaatttgtttgtgtttaatttattagagtaatttatatatttcgggttaaagtataatgagattgttattattattttgttttttgtaagattttttttttaagaataaaaagaaggtaataaagattttatatttttgttttttttagaaagttaaagagaatttaaagtgttggatgaaatgtttgtttttaatttgtagtgttttatttaaaaaaaaaattatgatataattttagaggataggttttttttttttagggtttttgaaagttaaaagtatatttttaatttgtagtattattgtattatttagtgaggataatttgtttagttgtgtttaggattagttagattaaggagttgaaattaagttttttttgaatttgaatgggattggaattttgttatttttagagtagtaatagatgatgttatgtttaagaatattttatttgattaataaaaaaggagaagtttgaaatgtaattttaaagaattttagaaggaggtttagatgaagataataaaattttttggagatatatttgttatttatattttttttttttaagttattggtttgttgtttttgagtttagttaaatttttaaagataagattaaagtaaggaagtaaggtatatagtttttggtttatggttttttttagatataagtattgtgaatgaagattttgttttatttatatttgggattttggagtttttataaagaatatttttagtataaggatgtgatttaaagggggatttatagaataatattttaattattgtttgatttatatttgagtgtaatggataaataaatataattttagttataaaatttgaaaaatatatatttttttatttaaaaatttttgatagttttgttaggtattggagaattagaaataaatgtttttttatttttttttttttgatgaaggaaagttattaaaaatagttatatagaaataataatataattgtagattttattttaaatatagttggtatgttttttttttttttttttatttattttttattttagatagttagaggggaaagtttgttttagagatagaaagaagatatttatggggtataattttattttagttatttgatagtttgaagaagtatttaattttttgaataataatgttataagttaaagaagagaaaagataggtagtttaaagttttttaatattgtgtatattttaattttttaagttagttttgagaaagtgtttttgttttgtagaagtatttggttaagtgttgtgaagtttattggtattaaaagaaattaaaaattttggaggattagagaattaaatttggtaatataaatgaaaatattttagaatgtaaaaagtatttaatttattatttttaattatgttttattatatatagatggtattatttatagtgaatgttaattattaatatttttttaaaaatgggtattaatttgttattagttgtttgtttttgatttagtttttttttgttgaaaggttttatttaattgtattataaagggataaaagggtaaaagataataagttttttagattggtagatttgttatttataaaatggttttgggtaggttatttgaattttttgaaatttaattagatttatttaaatttaagaatgagaatataaatttatattttgaagtgttttatagaaaggtttattttaatgtttggagtatatattttaatgaatatttattttattttatttttttttatttttgaattaagtaattttgaatttaaagttgttatgattagtattgaaaagattattggattattaattgtgtgattttgggatagtaattttttgtattttagtttgtttatatgttatatatgaaggttgaagtttgattttgttttgtgattattattttaaatatttgatgaaattaaattttagtgtttggaatggtagtataataaatttattaagaataaataatttattgtaaaaatatattgatttttaaatgatgtaattgatagttatattattgtagagggttgataaataataaaagaaatgaaagatgtatatggtgagaattgaaattattttgataagttttttatttgtttattatttaaaattaatgattatgttgaatgtttataaattataaaatataaaagaaattttataaatgcgtatgtataggagtttaagttattaaaagttttaaagtataagtttaaattaaattaattaaagaagttgagaggaaaaattggtttttatttttaattattattgttttgaggttttatgtttaatataattttttaagtagaggttttagagagaagagttgtgaggatatttttatatttgtgtagaaggaaaagtttgttatttattttagtatttttagtgttatattgatgtgtattttggatttattttgtttttattgtataaatttatatttgattttaaagaaaaggaaaatttaaagttttttttttttaaggggatagaaattttttgtgttaattgtttgatttttttttttgtaaggttttattggaaattttttgtaatataatgtaggggatttttttatgtgttgatgttgtttatatagtggggtgggtttgattgaagaaaaaaaatcgtatatacgtatgaaagattatggttttattttcggaaagtatgaaaggtgattgatatttttaagaagtttttgttatttaggaaaattattaaatattttatttagagatatttggaaagattgaaggaaaggaagaacgaagaaagtagaatttagatttatgtggggagagatttgtggtagaggaaaagtattttttttgaattcgataagggatttgtttgggggaattttttgtttagttttttattattagggttttttgaagtcgggttttttattgggtagttttttgggagtgtagtggggaatttttatattttttttttaggttttcgaaggatttcgtttttttagtgttttttttaggttggtaggagttttgagtttgatatttttttttgatgggataggtaagttttgtgggcgcgtaaatacgttgtaattaagttttttgttgattttatagttttgtgtgttttcgagaagaagtgatcgtatttaattgtttattgttggtttgttttttaagagtttgggggttttttttttttaatttagaattagttgtacggggggcggggaagtgggggtggggaaggagtgggagggtagtggttttcgcgagtagagcgatgttattgagtgagtttttgaatggggagcgttgttgtttttaagtcgattggtattttttgttaggaagaaacgttaagaggtgggagtgtttggggagggaggtaggcggtttttatcgtaggcgcggggagttgttttttcgttttttcgtttgttttttaagtttggatttttaggagtggttgaagttgcggagcgtttttggagtttgtgaatgaattttttttttttttttttttttttttttcgttgagtttttttttcggttttgacggtatagtgatataatgatgatgggtgttataattcgtatttgaatttgtaggcgagttgtttcgagtttttttggggaagaattttaggcgtgcggacgtaatagtcgagaatattaggtgttgtggataggagttgggattaagattttcggttagtttcgtattttttcgtattttttagtatcgtttcgtatttttcgtattttttttcgggttattacgttttttatgtgattcgtttgggtaacgtcgaatttagtcgcgtagcgttgtagtgaattttttttttaaattgtaataagtcgttttttaaggtaattacgttttttttgttttttttttaaaaaataaaaataaaaaatttatagaaaaaaattcgcgagtttagaaaaaagaagtaattggtagaaggttttaattaaggtaaagagttgtaaggcgaagttaagaaaatgtaggtatttaaaaaatgtaggtaatttttataaaggtttttggggagaggtatatagagggattttggtgttgaaaaagatttagataaaagaaatttagggtggggtgggggtaaaatgattaacggaattgggggaagggagggaataaattgtaaagaaattatagaaaagtggtgggtttttgagttggagagaagagagggatttttggtattttgatttttttgttgttgttgtttttaatacgttcgaggtaaaagtttgaatggggattattaagatttgttatagataagttttcgaagtcgttttggtgtaggttatttggttttttagtttttggtgtgtggttagtgtttggtgtttttggaaagttattttcgggtagtttttgatagtgcgattcggcgtttaagtagtttgggattttgcgcggatttgatttttttagatcgtaggtagtttgggaggaggttcggtcgggggaggtgtaggattttcgtcgtgtttttttgacgatttggggattgttacggttttttttcggcgtttttgggtttttttgttttgtacgcggtgcgaaggggttagtagggaaggagtagaggatggggggtggggttgttggagtttcgcggaggtttgggaggtttttgggcgggaaaagtttgttttgaatcggtagggatgtgtaataattttttttattttgaagagtgaaatagggtttgtcgtttttattttaataagtaaatcggtatttagagcgtattgtagataaaggtggttcggggattcgaattaggggtttttgggttagttttttcgtttagattataggagtttttcgtttttttatatattttttatttttttttagtttttcgttttagttgagtaattttattggtaggtttagcggtagcggcgcgcgcgtgtgtcgggagtttcgggggacgttttcggttggagcgttttatcgttttgtagaggcgtgggcgttgtagggcgatatttttggtgcgtgtagatttagggtattcgggttgttttggttcgcggtttgtgttattgggcgtggagcggtttgggtgttaggtagaggagagcggggtagaaaaatagtgttatagtttaaattatttgttttttaatttaattgcgtttcggtaagttttgtatgtttttgggagatgttgcgggaagggggagaaatttatacggcgtttggagagttgttttgtcgcgcgtatattcgcggtagagtttttttgggtcgcgttttttatttttgtgtttttttttgtttttattttttttgttttttttttttttttttagtttttgttttttttttttagtttttgcgtttttttttttatagttgataaatgaatggttagtgtgaaatttttgtttttttcgtgttttaaggtagtagggagggaggagcgagggaggcggtgcgttttttcggatttgtttttagtttagtttataagatttgtagaatttagatgtttaggaattgggagttttgcggcgggtgtgggcgttttttgatggagaagtttcgtataggcggagaaaaataagttttttagattaagcgtgtattttttataattttgtgtttaaggatggaaggttttagtttttttttaagttatttattttgtattttataatttgcggcgtatatttaggagtttggaggattttgaaaaaaggttttggtttgtgtaaagtgtagagatgttttttcgcgagtcggttggaacgtacgcggcgttttgggtttagttcgtcgtttagtggacgaacgtatatggtcggggtggagttaggtttcggaggtttagacgcgttattttgggcgtttttaagaaagataatatatatatcgtgtttttaaaatttatgattatttgaatttaacggtagggtttcgttttaggatattgtaaaagaagggtttttaatttaaaatttaaatttttttaattttagggcgggcgtcggacgggaaagtggagagaaggcgggtagtgggaggaaaaaagaaagggaaggaagggaagtggaaggaaagaggatcgtggaggggaggaaaaggagaaaggaacggagatggggtagatggtatttaaatagttaggaacggatcggaagggttcgtttcggggtttgggtttgaatttcgagattcgttttaggatattttttttttttttttagcggtaataaatgtgattgtagaggcgtgtcgggatggaagggtgggaaagaattagataagcggaggtggtttagtttcgtttaaaggggttgggtttggggttcgtttttattcgtttatttcgcgttaagggaggattcgtaacgggcgtttttcgtagcggttgggttagttagtcgttacgtgggttggcgtttcggtttttagtcgagacgggtgtgattttttgggtttagagattgtagtatagtcgtataggcggtcggcgtagtcgaggtttttatttatcgaggttaatgggggcggggcggggaaggtagggtttagtttaatcgagagagtcgagtggtttcgttttcgggattcggggtcggttgtttttggagttgattcgagttttatttagatagcgttgaatatttttattaaaaggttatttaagttttattttattttattttatttttgtttgttttttgggagtggtaggaggggtatcgtgtttttgttttgaggtaggggagaggttaaaatttattttaagtaaattttttgttagaaaaatgagattttatatcgtattttatttgttgattttttaaatatatttaggttattttaaagtttatttttagttaattaatagattaatttcgttttagattgttataaagagttcgtttggaatggtaaatattgttattcgataagattaatagaattttatgggggtaaatatggaagggttgcgagtgtaattgaggtttttgtgttttaatgaggaattttagcggggatttggcggggattggaagtttagtatttatttagggagtgattgagttggaaatttggagaagtttggtgtagacgagacggtgttttttagagttgtattttaagtttttttattttgttgtatattggaagaattggattttaaagattttttttattattttagattttgtagttaatagttacgtttttttttttttgtttgttgaaagttgtgatttaattgttttaagtattttttgataatttcgttaaatttattttgaaaatatttatataaagttttaaaataggatgttgtgagtgtaatataaaaataggaaggtattaatggaagtaataattagtgttttgagatagaagcggtttttagtttgtaatttggaaatgttaagagtagtatattagggagaaggtttttaagagtttgattttttgttttgagttttgagtaaagaaagaaatatgttagaattgtattgtttgttcgtagtaatattgtaaagggttttaatggattttaatgtgattgagtaattattttttttagtattaagtttatagtttttaatttttttgtgagaagattaggtaggaagcgggatgagatttaagataattatttaggatttatgttagaatttaaagttttgatttttttggtagataaaaatagagttggttttaaattgtattttttgtttttaaaaaaacgaggtttgaaaggaatttttttagatttatataggtttatagatgtaagttttttttttttttttgtgtttgtaaattggagggagatgtttttgatattttagaatatttgtatttatatatttgtaaattttgttaggaaaggatttaaatagttaaattaaaggtgattatgattaatgttaaagatattatttattgtttttttttttgttgtattattaggtttaaatattttggagttaatgattggttatttaattgagtaatagagtttttgagagcgtaaagattaattaattttgttttttaaagtttggtaattaagttttttttttttggtgagatttaaatatttttgttgacgttatttatggataaatatcggtaaatattgtatttaaaatgggatattgttttgtgatggagtagaattttttaagatatatggtttttttgaaagaaagaattaatgattgtagtaaggtatttttttattatttacgtagagaaattagttaggattgataaatatttattgttgggagttatttgttttggtttgagaaaatatgttgattgttatataggtttgtattttattagaaaatataaagtatgtattttttttgatttggaattagaaaagggggattagatatggatgttttggttaagttttattttaattagtgaatttttgttagtttttttttgtagtttagatttggtaaattatatatatataaagtttgtgtgtgtgtgtggggtgcgtgtgtgtgtgtatgtatatagggtttttaaatattgttaagtttttattattgaatgtgttagaggtggttgtattttagaggttagtataaagaatttttgtttaatgtgttagttttgttttttgaaatatatttttgggtagatttattaattataaaaggatataaatgtatatattttttatatttgtatatattttattttatttttttaaggattttaagaggtgtttatgtttataaaatgagattatatattttataataaatatatttgataaattataatttttttattattaaattattgatttgatattatttgaggtatagtggaatgagtattagatttggaattagaaagtttgagttggatttattagttgagaaaattaagtaaagatattatttttggatttttagtgttataatttattaaatgaatatgtagttataaagattaaaagagtaagtattttgaaaaattatataaaaaagggatgataatatattatgttttgggatttatattgatttaattttataattttaataataattgtattatttaagttatgtagtttttattgaatttataaaataaattagagaggggtatattgttttaaaaattgtttagttttattaattagaagatagattatagaaattgattttaatgaagttggatatttagtggaaaggaagaattatttaataaatggttttaggataattgatgggtttatgtaaaataagaattagtttttatttgattttttattttaaaagaaatataagatgaattaaatatgaaatgtagggaataattttttataaaatgataaaagaaaattatgggattaaaaaaaataagttaggaatagagaaatttgttttaagtaaaatataaaatttagtgttattttaggaaatattgataggtttgattaagtaaaaattatataaaagtaaataatatatttggaaaatatttacgatatttgagagataaaaagttaataatttttgatattttatggatttttatgaataattttgaaaagtttatatttattaaaatatgagtaaaaattatgtataggtagtggtagaaagagatatagagttttaaaattatagaaaaaatcgtttagttttatttgtaattaaataaatagtaattaaaatattaatgatatgttatattatttttttattaattagaggagtaataaaaaaaaataatttttttttttttttttttttttgagatggagtttgttatttaggttggagtgtagtggtacgattttagtttattgtaattttcgttttttaggtttaagtaatttttttgtgttagtttttttagtagttgggattatgggtatttattattatgtttggttaattttcgtgtttttagtagagtggggttttattatgttggttatggtagttgattttgaatttttgattttaagtgatttatttattttagttttttaaagtgttgggattataggtatgagttattgtgtttggtaaaaatgaaattaaaaagtttgatgtaagtttgtgttggttaggttgtggagaaattgggttttttatatattgttgtatgaaagtaaataggtttttttattttaaaaaataatttggtaattatttttttttgattttttattaaaagtttttaaaagatgtatatattttttgatttagtaattttatttttcgatattattatatggatggatattggtattaatattatttaagataaatggataaggatgttttttgtagtattgtttttaagagtaaatatttggaaatagtgtaataggtttattatagggaattatttaaataaaagttgttgtatttatttaatggaaaattatgtagttgttaaaaataatatggaaaaattgtatttgttgatttggaatattttttaaaatatattgtattttaagtgaaaaaattgatagataaaattgagtatatattatatatttaattatgtaaaatgggtgtatatttatttttttaataaatatttattgagtgttttaggtattgtggatataggagtgaataaaatattaaagattgttttgttggaatttttattatggtaggtagagaaaggtaatttttaattatatatgtaaaatggtgatatgtgttaggatgaaaatagagtatgggaaagggaatagagtatagtatgttttaggtagagtaatgagaaaggagtttattaggtagagaatagaggagtgttaaggggcgataatgtgaaaaagtttagttaagtttaggtttaggaatttatatgatgttattatttgtatgaagtaaatttatgaaatttcgtatttaaattacgtgatttttttttgttgtataatgattttttttgtgagaaagaattagtgagtaatatgatatgtgatgtttattatatttattttgtagttgaagtattttagaaagttggttgtttagggtatttaattagtagaatggtggataaaattatcgtgtttttgtttttaagttattttttgttagttgagtttttttaaaattaagggagaatattaaatatttatttaatagaattttggttttttttcggaggttgtttatttttggtgtgttttttattttttttgtagatattttttatggataggagttttattgattttgttttttatgttttttaggtaattaaatagttttagtattttgtatttggattgtttaatgatttttttttttttttattgattttattggagtagaaggttaaatataggtatttatttttatattttttaggtttttttatgtagatagagttgttattattagtagacggtgtttataagagagatatggaaaagtggaagaatggaaatagggatttggagtggtgttaaaaataaagaaagaggtttttgaaagttttttatttaatatgattaaatatagaagataaaagatgtaatttaatgattaaggatagggatatagttttgagaaaattatagaagtggaatgaacgttttggattttaaagaagagggaatggaaatgtagttttgaggtagttaaagttaataaagttttttgatatatttattgtagaaataaatgattattttttaatttaaggtttgtaaatttaggtgattataggggcgaggtatggagtggaaatgggtaagagattaagtgggggtagtaatggttttgagtatatagatttaaggggagagattgttgtttggttaatgtttatgattagttagttgaaatatagatttagtgttgttagattttttgattttttgaaagaagttagagattttatatttagtgtaaatagtttaatttttaaattgagtaatttatttaaatatatttatgtaatttatttaaatgtatttagagtatgtttgattttttttttgtatttttatttagttttaggggtaattttaaggaaagtgatgcgtatatttgttgtatttatgtagatggaggattatttttttttttttaataaaagatatttttataaggattgagtgtggtataaagagttcgatttttagtatttaaattgagtaggaaatttaaatatagaagatttttttttgggttatatttttggtttttttaaatgagatttgattttttagatattgataaatattatattattgggttatggtaaatttttaagtggattgatttaaaagtgtttaaaagtattttaggtgttaaggaattgttggtacggagttttaaaggtgtttttgtataagaaatagaggcgttgattatgtatttgatttataaatattttttaaggatatattttgaatttggtaatgaagaaatattgtgggaattattaagttgaataaagtattagttttgttttttagaagtttattgttttatagaggagattagatatgtttatagataatttgaagtatatagtaataaattataggatgatttattttaagtataaagtgtatattgttattatagtggtaatttaggttataatttttaaatgtaagagttttaaatattattttttttatttttagtgatatgaaattatgttagaatatttgtagaaagtttgaattagtaattttaataataaatattgagtattgatatattgtatattattgagatttattttatatatattattttattaatttttatgattatttcggtaagtattaatttttataattaagtagtgatagaaaatgaggtttagagagatatagtattttatttaaagttatagaatataagtagagaatgtagaatttgtattttgggttatttgatagtggagtttagatttttaaaattaggtttataaagattttttggaaaaaaagaaaaataaaaaatagagaataaatttttttgaagaaaagtaggaaattattatttataagtataattaaagagagatttttaattttttttttttttttttttttgagacggagtttcgttttgtcgtttaggcgtaattttagtttattgtaatttttatttttcgggtttatgttataaagaaagtttttatttgattggttcgatttgattgtttattagaatataggttttttagtagggttaataagttataatagttttagtgatataagataaatataaattaataataaggttaatttagaattattaatatatgttttttattgtgaattattagttggtttatagatggaaaatataagatatataatgtattagtttaaaaaatgttttttagagagtgtttagaattatagaatttaaaaattttgttttgaaaaggtttaatttttattttaaaatatataaagaaattaaatgtaaaaaaattaagagaaaaggttttaattaattaaatgttgtataattttaagttttatttatgtttaagattagttttgtaatttatgattaattttagtattagtttgtttttaatttaggtttgttaaataatatagaattttttttttaatgaagttttttagggttttagttgaaaaatatatattagttaggatgtttttaattgtaaggaataaaaagttacgattttattgggtttaaataataatgatatttataattttatataaaatgaagtttaaaggtatggtttattttaggtttaatttttaaggatttacgttttgtttttgttgatttttttttagttttatttttagaggtattttatttatttatggatgtaaaatttttataatagttttagtagaaagattttagtatgataatgtttagggaagaaaattgattatttttttttttgttttttttttaggatgaatttattttttttagggattttttattggaggaagagatttttttatattttattggttaaaattatattatatattgttttaaatttaattattggaaaagggaatggtatttttataattgatttaggatattaggattattttttgggttggggtttgatttaggattttttaaagtatgtgattgagggtaggtattagaatggaattagagttgtgttagaaaggagaaacgtatggttattatagaatagttttaaatgttatcgaggagggtataattgtaaaaattaaataattttttgttatttttttgaagttggtattttgatttttagatggttttttaatataggttttttttttttttattattatagttgttttgaaatttgagttggaagggaatattttgagatttagattgttaaatgttttttttaaagttatgtaataaattaaatggtaaagttagggtagttttttgatttagtatagggtatttttttttattttttatttttgagattttagaattgttggtattgttttaaaatttatggtaagaattggttatttttgtaattaatatttttttataatatatttgttttgtttgtttagttagttagaaattatatggagtttgtgttttaaaaagtttgtcgaagtttttattttttgttttggtattatgtgtatgaattattaattggtttttttttattttatatttgatgaagatgttttttttttaatatttttttttattgttttttatttttttttgttttatttatgattagttgtttgtttttaaatagattttgtggttatttatttttttttgtgttagtttttatttattagttatttgaattgtggtttttattgttttttatatagtttatttatttgtggttgttatatatatttatattgttatatgtttttaaattgtattttggaatgattttggtaatggttgtattggatgagatttaaattaataattaaagtattgagatagtttttgttattataagtttatttttgtttttatagtttaagaggagttattttttttatttttattatttaatgtttaatattatttttattatatataatgtataaaaagtatgtgatttatgatttattttaaatttgaatgtttgtgatttattttgtgtttttttttatttttagg

SEQ ID NO: 121 - DNA, 16579 bp, Artificial Sequence
  chemically treated genomic DNA (Homo sapiens)
tttagaaatgaagaaaaatataaagtaaattataagtatttaggtttaaagtgggttataaattatatgttttttgtgtattgtatgtaataagggtagtattaagtattaagtaataagagtagaagaagtagttttttttggattataaaaataggagtaaatttgtaatagtagaagttattttaatgttttaattattagtttgaattttatttaatgtagttattattaaaattattttagaatatagtttgggaatatataataatgtggatgtgtgtgataattataagtgagtaggttgtatgaagaataatagagattatagtttaagtaattagtggataggagttggtataaaaagaaatgggtgattataaagtttatttagaaatagatagttgattataaatagagtaagagaagatggggagtaatagagaaagatgttgaaagaaaggtatttttattaagtgtaaggtgagaaggaattaattggtggtttatgtatataatattaaaatagagaataaggatttcggtaggttttttaaagtatagattttatgtagtttttagttggttaagtaaataaaataaatgtattataaggaggtgttaattataaaagtgattagtttttgttatgaattttaaagtagtattaatagttttaaagttttaagagtaaagaatgaaagaaaatattttgtattgagttaagaaattgttttggttttgttatttaatttattgtatgattttggaaaagatatttaataatttgggttttagaatgtttttttttagtttaaattttaaggtagttataatgatgaggaggagaagaatttgtgttggggaattatttagaaattaaagtgttaattttaaaagaatggtaaaagattatttggtttttatagttgtgtttttttcggtagtatttagaattattttataatagttatgcgttttttttttttaatataattttggttttattttagtgtttatttttagttatatattttggagaattttgggttaaattttagtttaagggatgattttgatattttaagttaattatagaggtattatttttttttttaatgattggatttggaatagtatataatatagttttggttagtgagatgtgaggggatttttttttttagtgaagggtttttgggaaagatagatttattttgagaagagaataaaggaagaggtggttagtttttttttttggatattattatgttggaatttttttgttggaattgttgtagggattttgtatttatgagtaagtgagatatttttggaaatgaagttgagaaagaattagtaaaggtaaggcgtaagtttttaaggattagatttagagtggattatgtttttgaattttattttatatgagattataaatgttattattgtttaaatttaataaaatcgtgattttttgttttttatagttgaaagtattttaattggtatatattttttagttgggattttgaaaaattttattggaaaagaaattttatattatttagtaaatttagattgaaaataagttaatgttgaaattagttataaattataaaattgattttgaatataaatagggtttggagttgtatagtatttaattaattaagatttttttttttaatttttttgtatttgatttttttatatattttgaaataagaattagatttttttaaaataaaatttttaaattttataattttagatattttttgaagagtattttttaagttaatatattatatattttatattttttatttatagattaattgataatttataatgaaaaatatatgttgataattttaaattaattttattattagtttgtatttattttatattattagaattgttatgatttgttaattttattggaaagtttatgttttagtagataattaggtcggattaattaaatagaaattttttttatggtatgaattcgggaggtggaggttgtagtgagttgagattgcgtttgggcgatagagcgagatttcgttttaaaaaaaaaaaaaaaaaagaaattaaagatttttttttaattatatttataaataataattttttatttttttttaggaaaatttgttttttattttttatttttttttttttttaggaaatttttataagtttaattttaaaagtttgggttttattgttaaatagtttagaatgtaagttttgtattttttatttatattttgtgattttgggtaaaatattatatttttttaaattttattttttgttattatttagttgtgaaaattagtatttatcgaagtgattataggaattgataaaataatgtatataaaataaattttagtgatatataatatattagtatttaatatttattattaaaattattaatttagattttttgtagatgttttaatatagttttatattattaagagtaaaaagaatagtatttggggtttttatatttgaaaattataatttaggttattattatagtagtaatatatattttatgtttggaataaattattttataatttattgttatgtattttaaattatttgtaaatatgtttaattttttttgtagaatagtaggtttttggaaggtagagttagtattttatttaatttaataatttttataatatttttttattgttaggtttagggtatatttttgaggaatgtttgtagattaaatatatgattaacgtttttattttttatgtagaaatatttttgaaatttcgtgttaataattttttaatatttgaaatatttttgaatatttttgaattagtttatttgaagatttattatgatttaataatatgatgtttgttaatatttagagagttaaattttatttaaaaaaattaaaggtgtgatttaggaaaggattttttgtatttgagttttttatttaatttaaatattaaaaatcgaattttttgtgttatatttaatttttataaaagtgttttttgttggggagaggagaatggttttttatttatataggtataataagtatacgtattattttttttaagattatttttaagattaggtaagaatataaggaggagattagatatgttttaaatatatttgaataagttgtataaatatgtttgaataagttatttaatttaaaaattagattgtttatattaaatataaaatttttaattttttttaaaaaattagaaggtttagtaatattaagtttatattttagttggttgattatgagtattaattaagtagtagtttttttttttaagtttgtgtgtttaaggttattattgtttttatttagttttttatttatttttattttatgtttcgtttttgtagttatttaagtttgtaaattttgaattaaaagatgattatttatttttatagtaaatatattagagggttttattgattttagttgttttagaattgtatttttatttttttttttttggagtttaagacgtttattttatttttgtaatttttttaaggttatgtttttatttttggttattaagttatattttttgttttttatgtttgattatattaaatggaaagtttttagaagtttttttttttgtttttagtattattttaaatttttatttttatttttttatttttttatgttttttttataagtatcgtttattagtgataataattttgtttgtatggaaagatttgagagatatgagagtgaatgtttatatttagttttttattttagtgaagttaatgagaagggaagaaagttattgaataatttaggtatagggtattgagattgtttaattgtttgggagatataaaagataaggttaatggaatttttatttatgagaaatgtttgtagggaggataagggatatattagggatgggtagttttcgagagaaagttaagattttattaaatagatatttagtatttttttttgattttggggaagtttagttgataaggggtgatttaaggatagagatacggtggttttgtttattattttgttaattaggtattttagataattaattttttaggatattttagttataaagtggatgtaatgagtattatatattatattgtttattggtttttttttatagaaagaattattgtatagtagagagaaattacgtgatttaggtgcgaaattttatgaatttattttatataagtaatagtattatgtgaatttttgaatttggatttggttaagtttttttatattgtcgttttttagtatttttttgttttttgtttggtgaattttttttttattattttatttaagatatattgtattttatttttttttttatgttttatttttattttagtatatattattattttgtatatgtgattgggaattgtttttttttatttattatagtaaaagttttaatagagtagtttttgatgttttgtttatttttgtatttataatgtttagaatatttagtaaatatttgttaaaagaatgaatatatatttattttatataattagatgtataatatatatttagttttatttattaatttttttatttagaatataatatattttggagaatgttttaaattagtaaatataatttttttatgttatttttgatagttgtatagttttttattaggtggatatagtaatttttatttaaatggttttttatgatgagtttgttatattgtttttagatatttgtttttagaagtaatgttgtaaagaatatttttgtttatttgttttgggtgatattggtattaatatttatttatataataatgtcgagaagtggaattgttgaattaaagagtatatatattttttaaaaatttttgataaagaattaaaaaaaagtgattgttaaattattttttgaagtagaggaatttatttatttttatataatagtatatgagagatttagtttttttataatttggttaatataaatttgtattaaattttttaattttatttttgttaggtatagtggtttatgtttgtaattttagtattttgggaggttgaggtgggtgaattatttgaggttaggagtttaagattaattgttatggttaatatggtgaaattttattttattaaaaatacgaaaattagttaagtatggtggtgggtgtttataattttagttattagggaggttgatataggagaattgtttgaatttggaaggcggaggttgtagtgagttgagatcgtgttattgtattttaatttgagtaatagattttattttaaaaaaaaaaaaaaagaaaaaaattatttttttttgttatttttttgattggtgaaaaaatggtgtagtatattattggtgttttaattattatttatttaattatagatgaggttgagcgattttttttataattttaaaattttatgtttttttttgttattatttgtatataatttttgtttatattttgatagatgtggattttttaaagttatttataaaagtttatggaatattaagagttattagttttttgttttttaaatgtcgtagatgttttttaaatatattatttgtttttgtgtaatttttatttagttagatttattagtattttttagaatggtattgggttttatgttttgtttagaataggtttttttatttttaatttattttttttaattttatgatttttttttattattttgtaaaaagttattttttatattttatatttgatttattttatattttttttaggatgagaaattaggtagagattgatttttattttgtatggatttattaattgttttgaaattatttattgaataattttttttttttattgaatgtttaattttattggagttaatttttgtaatttgttttttgattaatgaaattaaataatttttaaaataatatgtttttttttgatttattttatagatttagtagaaattatatggtttgggtaatgtagttattattaaaattatagaattagattaatatgaattttaagatataatatattattattttttttttgtatagttttttaaagtatttatttttttgatttttataattgtatatttatttaatagattatgatattaaaggtttaaaagtaatatttttgtttggtttttttagttagtgagtttaatttaaattttttgattttaagtttagtgtttattttattatattttaagtaatattaaattaataatttaataataaaaagattataatttattaaatatgtttattgtaaaatatgtaattttattttatagatataaatattttttaaaatttttagaagaatgaggtaggatgtatatagatgtggaaagtatatatatttgtatttttttatagttggtaaatttatttagaggtgtgttttaggaaatagaattgatatattaaataaagattttttgtattgatttttgaaatataattatttttaatatatttaatggtaagaatttagtagtgtttaaaaattttgtatatatatatatatatacgtattttatatatatatatagattttatatatatgtaatttattaagtttaggttataagaggaaattggtaaaaatttattaattgaaatggagtttggttaagatatttatatttaattttttttttttgattttaaattagggagagtatatgttttgtgttttttggtaaaatatagatttatgtaataattagtatatttttttagattagagtaagtaatttttaataatgagtgtttgttagttttaattggtttttttacgtgggtggtgaaaaaatattttattatagttattaatttttttttttaaaagaattatgtgttttgagaagttttgttttattatagggtaatattttattttaaatatagtgtttatcgatgtttgtttatgaatgacgttaataaaaatgtttaaattttattaggaaaggagggtttagttgttagattttgggagatagagttagttgatttttgcgtttttaaaggttttgttatttaattaagtgattaattattaattttaaagtatttaagtttaataatataataaaagagagaataatgggtagtatttttaatattaattatggttatttttggtttagttgtttaggtttttttttagtagaatttataagtgtatagatataggtattttggaatattaaaggtatttttttttagtttgtaaatatagggaaaaagaagaaatttatatttgtaaatttatgtaaatttagggggattttttttaaatttcgtttttttgaaagtaggaaatataatttaaaattaattttgtttttatttattaaaagaattaaaattttgaattttgatataaattttaaatgattgttttgaattttatttcgttttttatttaatttttttataagaagattaaggattgtggatttggtgttggaggaagtaattgtttaattatattggaatttattggaattttttataatattattgcgggtagataatataattttaatatatttttttttttatttagagtttagaataagaagttagatttttggagattttttttttgatgtattgtttttaatatttttaagttataaattgggaatcgtttttattttagaatattaattgttgtttttattggtatttttttatttttatattatatttataatattttattttaggattttatgtgaatatttttaggatgggtttggcgaaattgttaagaagtgtttaaaataattaggttatagtttttagtagataaaaagaaaaagacgtggttgttagttatagaatttgaggtgatggaaaagatttttaaaatttagtttttttaatatgtagtaaaatgggaggatttaaaatgtagttttaagaagtatcgtttcgtttgtattaagtttttttaggtttttagtttagttattttttaaataggtgttgagtttttagttttcgttaggttttcgttaaggttttttattgaggtataggaattttagttatattcgtagtttttttatgtttgtttttatgaaattttattagttttgtcgaatggtagtatttgttattttaggcgaattttttatgatagtttggaacgaaattaatttgttaattgattaagaatgggttttagagtgatttgaatgtatttaaaaagttaataaatggaatacggtataaagttttatttttttgataaaaagtttgtttggagtaaattttaattttttttttgttttaaaataaaagtacgatgttttttttattatttttaagaagtaagtaaaaataaaataaaataaaataaaatttaaatagttttttaataagagtgtttagcgttgtttggatggaattcgggttagttttagaagtagtcggtttcgaatttcgggggcgaggttattcggttttttcggttaagttgggttttgtttttttcgtttcgtttttattggtttcggtgggtgggggtttcggttgcgtcggtcgtttgtgcggttgtattgtagtttttgagtttaggaagttatattcgtttcggttgggagtcgaagcgttaatttacgtggcggttggttaatttagtcgttgcggggagcgttcgttgcgggtttttttttggcgcgaggtgagcgagtgggggcgggttttagatttagtttttttgggcggggttggattattttcgtttgtttagtttttttttatttttttatttcggtacgtttttgtagttatatttgttgtcgttgggaaagggaaaagagtattttaaaacgagtttcgaaatttagatttaaatttcgaaacgaattttttcggttcgtttttggttgtttgaatgttatttgttttattttcgtttttttttttttttttttttttttacggttttttttttttttatttttttttttttttttttttttttttttttattgttcgttttttttttattttttcgttcgacgttcgttttgaagttgaggaagtttaagttttggattaggagttttttttttgtaatattttggggcggggttttatcgttgggtttaagtggttatgggttttgagagtacggtatgtgtattattttttttaaagacgtttagggtggcgcgtttagattttcgaaatttggttttatttcggttatgtgcgttcgtttattaagcggcgaattggatttagggcgtcgcgtgcgttttagtcgattcgcgagaaggtatttttgtattttgtatagattaagatttttttttagggttttttaaatttttagatgtacgtcgtagattgtggagtgtaaaatgaatgatttaagggaaaattagggttttttatttttgaatataaggttgtgaaagatgtacgtttggtttggggggtttgttttttttcgtttgtgcgggatttttttattagggggcgtttatattcgtcgtaaaatttttaatttttagatatttaggttttgtaagttttgtgagttgaattgggggtagattcgaaggagcgtatcgtttttttcgtttttttttttttgttgttttggagtacgggaaaggtagggattttatattagttatttatttgttagttgtgggggaggggacgtagaagttagagagagagaatagaggttgggagaggggaagggaggtagagaagatggagatagagggagatataaagatgaggaacgcgatttagagagattttgtcgcgggtgtgcgcgcggtaggataattttttaggcgtcgtgtagattttttttttttttcgtagtattttttagggatatgtaggatttgtcgagacgtagttggattggagagtaaatagtttaggttatgatattatttttttatttcgtttttttttgtttaatatttagatcgttttacgtttagtgatatagatcgcgggttagaataattcggatgttttaggtttgtacgtattagggatgtcgttttatagcgtttacgtttttgtaggacggtggggcgttttagtcgaggacgtttttcggggttttcggtatacgcgcgcgtcgttgtcgttagatttgttagtaaagttgtttaattagagcggagaattaggagagggtggggaatatgtaaggaaacggaggatttttgtagtttgggcgagaggattgatttagaggtttttgattcgggttttcgagttatttttgtttgtagtgcgttttgggtgtcggtttgtttgttgagatgggagcgatagattttattttattttttagggtgagaaaaattgttgtatatttttgtcgatttagaataggtttttttcgtttaggggttttttagattttcgcggggttttaataattttattttttattttttgttttttttttgttggttttttcgtatcgcgtgtaggataaaagaatttaggggcgtcgggagagaatcgtgatagtttttaagtcgttaaagagatacggcggggattttgtatttttttcggtcggatttttttttagattgtttgcggtttgaaggggttaggttcgcgtaaggttttaggttgtttgggcgtcgggtcgtattgttaggagttgttcgggagtggttttttaggaatattaggtattgattatatattaggggttgggaaattaggtggtttgtattaaggcggtttcggggatttgtttgtggtaagttttggtagtttttatttaaatttttgtttcgagcgtgttaagaataataataataaaaaaattaaagtgttaaaggttttttttttttttttagtttaagaatttattatttttttatgatttttttataatttattttttttttttttttaatttcgttagttattttatttttattttattttgggttttttttgtttgaattttttttaatattaaggtttttttgtatgtttttttttaaaagtttttatgaaagttatttgtattttttaagtgtttatatttttttaatttcgttttatagttttttgttttaattaaagttttttattaattgttttttttttttaagttcgcgggtttttttttataagttttttgtttttgttttttaaggggggaataaaagaaacgtgattattttggaaggcggtttattgtagtttggggggaaaatttattgtagcgttgcgcgattgggttcggcgttgtttaggcgggttatataggaagcgtggtggttcggggaaggatgcggagggtgcgggacggtgttggaagatgcgggaggatgcggggttggtcgaagattttggttttagtttttgtttataatatttaatgttttcggttgttgcgttcgtacgtttggagtttttttttagaaaggttcggggtagttcgtttgtaagtttaaatgcgggttgtgatatttattattattatattattgtatcgttagagtcgaggaggagatttagcgagaagaaggaggagggagaggaggagggtttatttataggttttaaaagcgtttcgtagttttagttatttttaagagtttaggtttggaaagtaggcggaggggcggaaaggtagtttttcgcgtttgcggtagggatcgtttgtttttttttttaggtatttttattttttggcgtttttttttgataagaagtattaatcggtttggggatagtagcgttttttatttagggatttatttagtaatatcgttttgttcgcggaaattattgtttttttattttttttttatttttattttttcgtttttcgtgtagttagttttgggttaggggaaaggagtttttaggtttttagggggtaggttagtaatagataattgagtacgattattttttttcgggagtatataaaattgtaaaattagtaaagaatttggttatagcgtgtttacgcgtttatagagtttgtttgttttattaaagggaagtgttaggtttaaggtttttgttaatttgaaagagatattgagaaaacgagatttttcggggatttagagggaaagtgtaagaattttttattgtatttttagggaattgtttaatggggagttcggttttaaaagattttggtaataaaaggttggataggaaatttttttaggtaaattttttgtcggatttaaagagaatattttttttttgttataaatttttttttatataagtttagattttgtttttttcgtttttttttttttttagtttttttaagtatttttgagtagaatatttgataatttttttgagtaatagggattttttggaagtattaattattttttatgtttttcggaaataagattataattttttatgcgtatatgcgattttttttttttagttaggtttattttattgtgtaaatagtattaatatatggaagagttttttgtattgtgttataaaagatttttaataggattttatagagaaaagggttaaatagttgatataaaggatttttgtttttttagaaaagagggattttggattttttttttttttgaagttaagtatgagtttatataataggaataaaataaatttaaggtgtatattagtataatattagggatattagaatggatggtaaatttttttttttatataaatatgaaagtatttttataatttttttttttgaagtttttatttagaaaattatattaaatataggattttaaaatagtagtgattaaagatgaaagttaatttttttttttaatttttttgattagtttggtttaaatttatgttttaaaatttttagtaatttagatttttgtatatgcgtatttataagattttttttatattttgtaatttgtaggtatttagtatggttattgattttaagtgataaataggtagaagatttgttaggataattttagtttttattatgtgtattttttattttttttgttatttattagttttttgtagtaatataattgttagttatattatttggaaattaatgtgtttttgtagtgaattatttatttttagtaaatttattgtattattattttaaatattgaaatttgattttattagatgtttagaatgatagttatagagtagaattagattttaatttttatgtataatatgtaaataaattaaggtgtagaaagttattgttttaaagttatataattaatagtttagtggtttttttagtgttaattatagtaattttagatttaagattgtttgatttaggaatggagagaaataaaataaaatgaatgtttattgaaatatatattttagatattaagatagatttttttgtgaaatattttaagatgtggatttgtatttttatttttaaatttgagtaaatttagttgagttttaaagagtttaagtaatttgtttaaggttattttgtaagtgatagatttgttagtttgaaaagtttattattttttatttttttgtttttttatgatatagttaagtaaaattttttaataaaggagaattagattagaaataagtaattaatagtagattaatgtttatttttagggaaatgttaatagttaatatttattataaataatgttatttgtatataatggaatatgattgaaagtgatgggttagatattttttatattttgagatgtttttatttatgttgttaaatttgattttttaattttttaaaatttttagttttttttaatgttaatagattttataatatttgattaaatatttttataggataaaggtatttttttagggttgatttaaggaattagaatatgtataatgttgaaaagttttaaattgtttgtttttttttttttttgatttgtaatattattatttagaaaattaaatatttttttaggttattagataattaaaatgaaattatattttatggatattttttttttatttttagggtagatttttttttttagttgtttaaaatggagaatggataaaaaagaaaaaggaaaatatattagttatatttagaatagagtttatagttgtattattatttttatgtaattgtttttaatgatttttttttattaagagaaagaaaatgagagagtatttatttttgattttttaatgtttgataaaattattagaagtttttgaatgggaaaatatatattttttaggttttataattaaaattgtatttatttgtttattatatttaagtatgaattaaatagtaattaaaatattattttgtgagtttttttttaaattatatttttgtattggggatattttttgtgaaaattttaagattttaggtataaataaagtaagatttttatttataatgtttgtgtttaaaagaaattataagttagaagttatgtgttttgtttttttgttttgattttgtttttgggaatttggttgagtttaggggtagtaagttaatgatttggagaggaaaggtgtagatggtagatgtgtttttagggaattttattatttttatttaaatttttttttgaggttttttaggattatattttagatttttttttttttattgattaggtgaagtgtttttagatatggtattatttattgttgttttagggatgataagattttagttttatttaaatttagaaagagtttagttttaattttttgatttgattggttttaggtataattaagtaaattatttttattggatgatatagtaatgttatagattaaaaatgtatttttaatttttaaagattttggaaaaaggaagtttattttttaagattgtgttataattttttttttaaataaaatattgtaaattagggatagatattttatttagtattttgaattttttttggttttttaggaaaggtagaaatataaggtttttattgttttttttttatttttaaaaaagaaattttgtaaaaggtaaagtgatggtggtaattttattgtgttttaattcgaagtatataaattgttttgataaattaaatatagataaatttttttagaaagttataaaatattagattttttttagatattagatattgagtttttgttttttaatttttaaattaaaatgttatagtaaaatatttgttttaataaattttttttttttttgtgttgtaaatgttttgtttatggttgagtagatttttttagaatttaattgaaagattatttatattacgatagaattatgtaagttaaagttaagttttaatatggagtgatgggagaggtcgggttgtcgagaggagatgattttattagtgagaagagaggttttttgagtcggtttttaaggtagttaaatggtttagtatatttgtatttattttgggaggttgtttggagtagagtattaaaaacgttattttttttataaagaaaaagatgaaggtataaagaatatagtttaattaaattgaattaaagattgtattatttttattttttttttagttatttttttaaagttttttttttttttttttatagtttgaaaaatataggttatttttataaagtatttgtttgattgaagtaagataaattgaagagtttggtttttgaatataaggaagcggtagagattttagaattaatgaggtagggcggaatataatgtagaaggttttttaagaggtaaaatttttgtagttgttgtttatttttagtgattattcgtttttatttatttaattagattatagtgggatcgagataaggagtataatgaaagttgttgtattgatggtgtaaaaagatatatggtattattaatgtttttgtggtgagtaaaggtagaacgtaagatagaaaataaggaaatttttgcgttgtaagaaaagtgtttagtatgggtattaatcggtatgtagaagtagtaagtatatattttatttttattttattgataaaaagaattgtaggattaatgtttgtttttattaaaatatgagaaattatattttaattttataaattaaaggttaaatatttgttgtaataattttaaaaaaaagagaagatttgtaagatttagtaaatatttattataaatagattgtttttaattttttatatttttttttaatttaataaaagtttattgagtagtttttatgtgtattgttttagatagtaggtattatttaaaaaagtaataattattttttatttttaaggagtttataatgtttttagaaagaaattaatttattggagtagttaaagttataattgatttataaaatgattagtgaatttagaggaaaattatatataaatatttttgtttttattggttggtttagttagatattattttaaaaaata

SEQ ID NO: 122 - DNA, 6090 bp, Artificial Sequence
  chemically treated genomic DNA (Homo sapiens)
tagagatggaatgtttaaattaggataatttagggaggtgtgggagaggtgtagggggattataagggatggagtaggaatttaaggtagtaatagtagagttggtattaattttaggtttaaaaagataaaggagagagagtggttattaaaatttagaaagagaaaattcggtaaaagacgggatttggtgaggagtagtaatttgtgtttggttgtggattgtggtaattttgtagggaggagagtagaggaatgattattttggttttatttttttttttttttttttattttatgttaggtgttttattggttaaatttattagtaattagaggataaggaatgtattaaaataattttacggtttagagagtagattagatgtagagtgataaatggattatatttagtataatcgtaggtttatttgttgattcgttttttttattagattgagttatttgaggatagagaatgttttttttatatttgtatttttaatatttggtggatattagatatttaagaaatgtttatggacgggattagagaagatggtaaattgggtattagatggaggtttgtgttttttgagtttgtcgtatgttttttggcgaatttaaggtaaaatgagaaatagaatgagttttgtatttttgtttggtaaaagaaaatatgatttggtgagaagaaatgaatatttttagtatttagtgttgggaggaattggaattagttatgtgattgtttttattagaggtttttaattgcgtaacggatagaatttttaatggtgaaattataatgtagaaatatttttttttttttttttttttttttttttgagacggagttttgttttgttatttaggttggagtgtagtggtattatttcggtttattgtaagtttcgtttttcgggtttattttatttttttgttttagttttttaagtagttgggattataggtatttgttattatatttggttaattttttgtatttttagtagaaatggggttttatcgtgttagttaggatgtttttgattttttgatttcgtgatttgttcgtttcggttttttaaagtgggaaatatttttaaaaatattagtttttgataaaattaaagttatgttataaaaaagtaattaaaaggtggaaatgagataatatggtttattttgagttgagaatattttgttagaaaatgattgttttagattttaaatttgattttttatataaatttttagtgtaattttttttgtattatttttttttttattagttaaaagatggaaaggataaattgaggaatttacgttggaggagtatggatttattagatggtagaaatttgggtttttgaatgattattgtggagttgatttttgtttatgttttgtaaatttttgtgttgagagtaagtaatatatttttaatgtgttaaatttttgggatttgttgggttttatagtaatggttattttattttaatacgattgtaaaataatgttttaaaatttatagtcgggtttgtttaaaatattatcgttattattattataatttatagtttatattataattatttttatagaagttttttttaattggtattttataatttgtggttttttatattgttgttttttatgtgtgagatgtttttttgagttttttttgttagggatatgatagaaaataaaatatttaatattttggtgtattttataatgtataaagttttgttttatgtattatttttttagatttttttaataaatttaaggaatatgtaagggtttataattatttttattttataggtgatgaaattgagacgtttatatgtaaagtggaaataattatttatttatttatttatttattaaataaaaatttcgttaatttatttaaagattaattgagagaattattttatttgtttggaatttggtatgtgttaagagaaaagtttttttaatttttttttttaagaagataatttattgttatataataaattattttgaaataatgatttaaaatattaaaagttattgattttgtttatagaatttgaattggaagatataaataattgggagtgagggtggggttggatagttggtttttttgggtatttttcgttttttttgtggttttgttatatgtttttatatggtagttttagggtaattatgatagttgaaggttttagagtgggtggagggggagagggagggagggaaagagagagagagagagagagagagaaagagaagtaagtaggtagaagttttaatgttttatgatttaattttggaaataaattatattgtgttattgttattatttttttttagaagtaagtagatagggttggtgaatatttattgagaggggaattagattttattttttgattgggggagtgttaaagaatttgtgaatatgtttttaaatgattatattttttttttttaaaatgtttgtttaaattggtgtatataaaaagttcgggggttagtgatttatttaaggttattaagttgttaaatggttttattaatattagatttaattttgtgattttaaattttatgtttttttttattattttagataattttcggtgaatattattgtttattagggtagttaagatattttagttgttaaatagatttagtttttttaattgtttcggataatatattttttattttgtagaaaataaatattatttatatggtagttatttataaatattttttaagtttattttaaatatttgtgttttaaatttttttttttaatagatgtatttatttgtatttttttagatgaattattttttttttgttgttgttgttatttttgattgtattttttattttttaagatttttttgtattattaagtttattgtttaagttaatattattttttaatttggggatttttttttgatttttgtgtgttttttttgtgggttattaatgtaatgttatttaagattaggatttggttgggcgtagtggtttacgtttgtaattttagtattgtgggaggtcgagtcgggaggattatttgaggttaggagtttaagattagtttgattaatatggtgaaattacgtttttattaaaaatataaaattagtcgggtatagttatatgtttgtaattttagttattgggtagtttgaggtaggagaatcgtttgaattcgggaggcggaggcggagtttgtagtgagttaagattttataattgtattttagtttgggttataagagcgaaaattcgttttaaaaaaaaaaaaaagattaggatttgatataaggtttgaggggtatttttttgttttgttttgttttgtttttaagaggttaaaatttttatagttgaaaatttttgttgaattatagagatttgaattaatttagtttagaaagtttggggatttgaataacggtatggatcggaaatttttttatttgttagtttttattattttaggtagtaaaatagatttttttttaggagttttttatcgtttggggttttttagtagtgggatgtggggaattaattttttttcgtttttatttaaatattaggtgggagtaaggggtgggaagtagagaaagtggatagaggtttttagtggatatgggatttttgtgtagattagtatagtttttagaaattttatgtaagtaatataggtattgttatattttttagtggttattttttaaaaagtaaataggtgaggtcgggcgcggtcgttacgtttgtaattttagtattttgggaggtttaggcgggcggattacgaggttaagagatggagattattttggtcgatacggtgaaatttcgtttttattaaaaatataaaaattagttgggtatggtgacgcgcgattgtagttttagttattggggaggtcgaggtaggagaattatttgaattttggaggtggaggttgttacgttttattatattttagtttggcgatagagtgagatttcgttttaaaaaaaagaaagtaaataggtgaaattaattttaataatatattttgtttaatttaacgtatttaaaatattattatttgaaagtgtaatgaatataaaaatatttatgagatattttttatttttatatttatattgttttggattttaatgtgtattttatatttatagtataattaatttgggattagttatattttagtttaataatagttaatagtatatgggatagcgtaaataaattttgcgtttttgttgtttttttgggtttcggagattttaattttttttttagattgtaaatttttttgtttttaagtttcggttttaatattagttcggtagaggaatttagtttaatgaggtacgttttttttttgttattttttattttattaatttgtttcgtggtaaacgtaggattgattttttaaaattattttattaattagtttatatatttattatttatttgttttattagaatgtaggttttcggaaggtagggatttaaaaaaatttgttttgttttatgtgatttttttatattaagtatcgtgttcggtataagttgggattttagtatatatttcgggacggaagaatcgtgtttttttagaatttagttagagggtagtttagtaatgtgttataggtggggcgttcgcgtttcgggcggacgtattggtttttcggtcggcgtgggtgtggggcgagtgggtgtgtgcggggtgtgcgcggtagagcgcgttagcgagttcggagcgcggagttgggaggagtagcgagcgtcgcgtagaattcgtagcgtcggtttggtagggtagttcggaggtgggtgggtcgcgtcgttagttcgtttgtagggtttttattggtcgtttgtcggtcgtttttcgtttaaaaggcggtaaggagtcgagaggttgtttcggagtgtgaggaggatagtcggatcgagttaacgtcggggattttgtttttttcgcggaggggattcggtaattcgtagcggtagggtttggggtcggcgtttgggagggatttgcgttttttatttattttttagttgtgttttcgtcgcgtttcggttagttttcggcgttggcgtttatggtcggttttcgatagcgtttcggagggatcgggggagtttttaggcgttcgggtgagtagttaggcgcggtttttcggttttttcgattttcggcgttagtttttgtttttttagttagggcgcggtggggtttgttcgggtagtgtttcgagtaattgggaaggttaaggcggagggaaatttggtttcggggagaagtgcgatcgtagtcgggaggtttttttagtttcgcgggtcgggtgagaataggtggcgtcggttcgattaggcgttttgtgtcggggcgcgaggatttggagcgaattgttgcgtttcggtgggtcgttttttttttttttttgttttttcgggcggtcgtacgtcgggtcggtcgggtaacggagagggagtcgttaggaatgtggttttggggattgtttcgttcggggaaggggagagggtggttacggtgttaggagaggcgcgggagtcgagaggtggcgcgggggtgttatcgttgtcgtaggttggagagagattgtttttagtgaggcgcgtatcgtttgggcgagggttttattttttcgcggcgtttttggaggtgggaaagttgggtgggtatgtgtgtagagaaaggggaggcggggaggttagttattttcggagtcggttttgattttaatagatcgtttagcgtttggggacgtcgatttcggggtgtcgtggtgttcggttttacgcgcgcgcggggttgaggggtcgggggcgtttttggtcgtttagttttaataaagggtgtttttttttatttcgcgaggaggggtagtttcggagattcggtttttagcgagcggggttttagcgtcggggaggtttatttttttttggggttgttattttattattattattgttttttttttttttttaaaagg

SEQ ID NO: 123 - DNA, 6090 bp, Artificial Sequence
  chemically treated genomic DNA (Homo sapiens)
ttttttgaagaaaaaaaaaaggtaataataatagtaaaatggtaattttaaaaggaagtagattttttcggcgttaagatttcgttcgttgaagatcgggttttcggagttgttttttttcgcggggtggagaggagtattttttgttaaagttgggcggttagggacgttttcgattttttagtttcgcgcgcgcgtggggtcgggtattacggtatttcgaggtcggcgtttttaaacgttgggcggtttgttgggattagaatcggtttcggaagtgattggttttttcgttttttttttttttgtatatatgtttatttagtttttttatttttagggacgtcgcggaagaatgaagttttcgtttagacggtacgcgttttattgggagtaatttttttttagtttgcggtaacggtggtattttcgcgttatttttcggttttcgcgttttttttaatatcgtggttatttttttttttttttcgagcgaggtagtttttagagttatatttttggcgatttttttttcgttattcggtcgattcggcgtgcggtcgttcgggggagtaagggagggaagggagcggtttatcgaggcgtagtagttcgttttagattttcgcgtttcgatataaagcgtttggtcgggtcggcgttatttgtttttattcggttcgcggggttggggaagtttttcggttgcgatcgtattttttttcgaagttaagttttttttcgttttggtttttttagttgttcgaggtattgttcggataaattttatcgcgttttggttgggaaagtaaaagttggcgtcgggggtcggggggatcggggagtcgcgtttggttatttattcgggcgtttgggagttttttcggttttttcggagcgttgtcggaggtcgattataggcgttagcgtcggagattagtcggggcgcggcgggaatatagttagggagtgagtggggggcgtagattttttttaggcgtcggttttagattttgtcgttgcgagttgtcgagtttttttcgcggagggaataaagttttcggcgttggttcggttcggttgttttttttatatttcgaagtagtttttcggttttttgtcgttttttgggcggagggcggtcggtaggcggttaatggggattttgtaagcgggttggcggcgcggtttatttattttcgagttgttttgttaggtcggcgttgcgggttttgcgcggcgttcgttgttttttttagtttcgcgtttcgggttcgttggcgcgttttatcgcgtatatttcgtatatatttattcgttttatatttacgtcggtcggggagttagtgcgttcgttcggaacgcgggcgttttatttgtgatatattgttaagttgttttttgattgggttttagggaaatacggttttttcgtttcgagatgtgtattgggattttagtttgtgtcgggtacggtgtttggtatgggaaaattatatagaataaaatagatttttttaaatttttgtttttcggaaatttgtattttggtgggatagatagataataaatatgtaagttaattaataaggtaattttggaggattagttttacgtttattacgaaataggttaatggaatagagaatggtaggaagggagcgtattttattagattgggtttttttgtcggattggtgttggagtcgaggtttgaaggtaagaaggtttgtaatttgaagaaagggttgaggttttcgagatttaaagaagtaatagagacgtagagtttatttgcgttattttatatgttattggttattgttgagttgaaatgtagttagttttaaattaattgtgttgtaagtgtaaaatatatattagagtttaagatagtatggatatgagaatgaaaaatattttatgaatatttttatatttattatatttttaaatgatagtattttggatacgttgggttaaataaaatatattattaaaattaattttatttgtttatttttttttttttgagacggagttttattttgtcgttaggttggagtgtagtggagcgtggtaatttttatttttagggtttaagtgatttttttgtttcggtttttttagtagttaggattatagtcgcgcgttattatgtttagttaatttttgtatttttagtagagacggggttttatcgtgtcgattaggatggtttttattttttgatttcgtgattcgttcgtttgggttttttaaagtgttgggattataggcgtgacgatcgcgttcggttttatttgtttattttttaaaaggtggttattagaaaatataatagtatttatgttgtttgtatgagatttttgaggattgtgttggtttatataaagattttatatttattggagatttttatttattttttttattttttattttttgtttttatttaatgtttgggtggagacgaagaagggttgattttttatattttattgttggagaattttaaacggtgaaaagtttttaaagggaaatttattttattgtttagaatgatgaaaattgatagatgaagagattttcgatttatatcgttgtttaaatttttaggttttttaaattgagttggtttaaatttttgtggtttaatagaaatttttaattgtgaagattttggttttttgaaaataaggtaaaataaaataaaagaatattttttaggttttatgttaaattttagttttttttttttttttgagacgggttttcgtttttgtggtttagattggagtgtagttgtgaaattttggtttattgtaaatttcgttttcgtttttcgggtttaagcgatttttttgttttaggttatttagtagttgggattataggtatgtgattatgttcggttaattttgtatttttagtagagacgtggttttattatgttggttaggttggttttgaatttttgattttaggtgattttttcggttcggttttttatagtgttgggattataggcgtgagttattgcgtttagttaaattttagttttaaataatattgtattaatgatttataggaagggtatataggaattaaggggaagtttttaaattgggagatggtattagtttaagtagtgggtttgataatataaaagggttttgagaggtgagaaatatagttaaaaataataataataataaaaaaagagtgatttatttgggaaaatgtaaatgaatatatttgttgggagaaaaaatttaaaatatagatgtttgggataaatttggaaggtgtttatggatgattgttatatgggtaatatttattttttgtaaaataaaaaatatattgttcgaggtaattaaaaggattgaatttatttggtagttagaatgttttaattattttaatggataatgatgtttatcggagattatttggagtagtgaaaaagagtatgaaatttggagttataaaattagatttagtattggtggaattatttaatagtttaataattttggatgagttattaattttcgagttttttgtgtatattaatttagataagtattttagaaaggggaaatgtggttatttaaaaatatatttataaattttttgatatttttttaattaagaggtggagtttaattttttttttaataaatatttattaattttatttgtttgtttttaagaaaaggtagtggtagtggtatagtgtaatttatttttaaggttaggttataaggtattagagtttttgtttgtttgtttttttttttttttttttttttttttttttttttttttttttttttttttttttttatttattttaaagtttttagttgttatgattattttagggttgttatgtagagatatgtgataaaattatagaaagaacgagagatgtttagagaagttagttgtttagttttatttttatttttagttgtttatattttttagtttaagttttgtgagtaaaattaatgatttttaatgttttaagttattattttagagtggtttgttatgtagtaatagattatttttttaaaaagaaaaattaagaaaattttttttttaatatatattaggttttagatagatgaaataatttttttaattaatttttaaataaattagcggggtttttatttaataaataaataaataaataagtggttatttttattttatatgtaaacgttttagttttattatttgtgaaatgaagatgattatagatttttatatattttttgggtttgttgggagaatttaaagagataatgtatgaaataggattttgtatattataaaatatattagaatgttggatattttattttttattatgtttttagtaaaaaggatttagagaggtattttatatatagaaggtaataatataagaagttataaattatgagatgttagttgagaaggatttttataaaaataattatgatatggattatggattataataatgatggcgataatattttaaataaattcgattgtagattttagaatattattttatagtcgtattagggtaaaataattattgttataagatttaataaattttagaggtttaatatattaaaaatgtgttatttgtttttagtataaaggtttgtagggtataagtagagattagttttatagtagttatttagaaatttaggtttttgttatttaatgaatttatgtttttttagcgtaagttttttagtttattttttttattttttggttgatgagagaagagataatatagggaggattgtattgaaggtttatgtaggaggttagatttgaagtttgagataattattttttggtaagatgtttttagtttaaagtggattatattattttatttttattttttggttgtttttttgtaatatggttttggttttattaagggttaatatttttaagaatgttttttattttgggaggtcgaggcgggtagattacgaggttaggagattaagagtattttagttaatacggtgaaattttatttttattaaaaatataaaaaattagttaggtgtggtggtaggtgtttgtagttttagttatttgggaggttgaggtaggagaatggggtgaattcgggaggcggagtttgtagtgagtcgagatggtgttattgtattttagtttgggtgatagagtaagatttcgttttaaaaaaaaaaaaaaaaaaaaaaaaaagaatgtttttgtattgtggttttattattaaagattttgttcgttacgtagttgagagtttttgatagaggtagttatatgattgattttagttttttttagtattgagtgttaaaagtatttatttttttttattaaattatatttttttttattagataaaagtatagagtttattttgttttttattttgttttggattcgttagaaagtatgcggtaagtttagaaagtataaatttttatttaatgtttaatttattattttttttgatttcgtttataagtattttttgagtatttagtgtttattaaatgttagggatatagatataagagaaatattttttgtttttaggtaatttagtttgatgagggagacggattaataaatagatttgcgattgtgttaaatataatttatttgttattttatatttaatttattttttgagtcgtaagattattttaatgtattttttgttttttggttgttggtaggtttagttaatggggtatttgatatgagatgaaggagaaggaaggagagtgaagttaagatagttatttttttgtttttttttttgtaagattgttatagtttatagttaaatataggttgttgttttttattaggtttcgttttttatcgggttttttttttttgggttttggtaattatttttttttttttgtttttttgagtttagggttggtgttagttttgttattattattttgggtttttgttttattttttatggtttttttgtattttttttatatttttttgaattgttttaatttgagtattttatttttg

SEQ ID NO: 124 - DNA, 5286 bp, Artificial Sequence
  chemically treated genomic DNA (Homo sapiens)
tattttttgtttatttagattttttttttgtttatttgttgttgtgaattttgtatgttatatatatatataaaatatgtaatatattatatattatatgtaatatataatatataaagtatattatataatatgtattatattatatattatataatatgtaatatattatataatatataatatgtattatattatatattatataatatgtaatatattatataatatataatatgtattatattatatattatataatatgtattatattatatattatataatatgtattatatattatataatatgtattatatattatataatatgtattatatattatataatatgtattatatattatataatatgtattatatattatataatatgtattatatattatataatattataatatgtattatatattatataatattatataatatgtattatatattatataataatatataatgtgtattatatataatataatattatataatgtgtattatatattatataatattatataatgtgtattatatattatataatattatataatgtgtattatatattatataatattatataatgtgtattatatatataatattatataatgtgtattatatatataatattatataatgtgtattatatatataatattatataatgtgtattatatatttaatattatataatgtgtattatatatttaatattatataatgtgtattatatattatataatattatataatgtgtattatatattatataatattatataatgtgtattatatattatataatatatgatgtgtattatatattatatattatatgatgtgtattatatattatataatatatgatgtgtattatatattatataatatatgatgtgtattatatattatataatattatatgatgtgtattatatattatatataatatataatattatatataatatattatatataatatattatatattatatttatataatttatataatatattatatattatatttatataatttatataatatattatatattatatttatataatttatataatatattatatattatatttatataatttatataatatattatataaatatattatatatagtattatatatataaaattatattttaagttttagggtatatgtgtataacgtataggtttgttatatatgtatatatgtgttatgttggtgtgttgtatttattaatttgttatttatattaggtatattttttaatgttattttttttcgttttttttattttataataggttttagtgtgtgatgtttttttttttgtgtttaagtgtttttattgtttaattttaatttatgagtgagaatatgtatgttttatatgtttttaggtagagaggaaattgttgagtaggtcggggtaggggatagagttttgtggttttttattttagattttttttggttgattgttatggaatgtagttatttagtagggttaaattttttgatgtttttgttggttgtttagtttttagggataggttatgggattttggtttttgttttgttatttttttagttattttgatttttacggggaggaatagtttgggaaaggatttggttatagtatttttattttagggttattgaggattttatagttgtgtgtttggtgggttttgtttagagtttatttgagagtagtggatgataggataggtttatgtgatttaggtaggtagtaatattgggttagtttttatgtttttttttgttagttggggtagtttggaagtatgattgtggggtaggtgttatgggtacggaatagattttaggtggaggttgtaggggtttttcggtatcgtagatatagtaggtttaggagtaggggagggagttatgatttagggagattttggtttatatttttggtagatgagggttataggggaatgggtagtattgtttaaagttttttgggttgggttcgtagttgtttttggtttagattttttggtgggttggttagaaatatgtagtaatttggggtagttattaggtggttaagtttgtattgttgggttttgtgagtttgggttagtttaggttttttttgggttttgtttttttgggttgttcgggtggttttttgggtttggggtgttaatgtttttggatgggtagtagaattagtttgtatttagggttttaggttatgttttcggaatatatttttagtattgatagtagcgtgtggtgaggttttttaggttgggttttggtttagtgttaggggtattattattttatcgtttttagagttatttttgggatattggttgtgagtttagatgttttgaatagggatagggagagttagagggaattagtttggggtttattggaggggttcgtgggtagatagcgttttttggagggaattgagtttgaaaggaaggaaatttttttttcggtttatagtatttgttatttagggtttttttagggttgcgtgaattttagttacgtggtgataggtcgagttattatgttaagttattgtgcgtttttttgttgttgtgacgttagtttttttatttttttagttaggttggattttcgtgagaggtttgtttgttttgtattttgtgtagatgttttttattgttcgtcggggttgttgggtacgttttggttggttttttggattaggtaagtttatgagttttttggtcgtttttgttttttttttgtttttgttttttttcggaggtggttatttttagattttagttttaattcggaggttttttgaggagtgttgtagggggttataggcgtggttttgagttattttggagagtggcggggggtttagttagttttgtggttgggatttttttaggtagataagtttgtttttttttttttagcgggtgtagtttagaattgttttttgaggaagaggtgtttttttgggtttttattgtttttaggttttaggtaagtttattagggttttaaggaagggggtttgggtttgaggttaattatggtagttgatttattttttagttttagttttttttagtgtgtgtagtttttacgttgtttgggtgagaattaggtttttgggtttggatatttttttagtgagtttttagggtggagggatgggaaatggaagtttaggattttagtagggtgttttttttcgattcggggatatttgtttgtgggaggttgggtttatttttttttgttgatttgttttgggaggaagggatagggtttagtattgtttatttttttttttgttttttttagtagtttgagtttggttgggtgttttttgtttttttagtagtttatttgggtttttgggtagatagattaatagataggcgaggttgggttatggttggattattttaggattttgatcgggggtttagtttatgattttgagtttgggagagatgaggttatgttttttagggtatttagtatgattcggtttagtggacgggattgggtagtttttttggtgtagggggttgttatgttaggacggggttattgattaggttaggtttttgttttatgatttgtggtggaaatgtttttttgtttttgtttttttgtattttttttgagacggagttttatttttgttgtttaggttggagtgtagtggtgtaattttgttttattgtaatttttattttttgggtttaagtaatttttttgttttagtttttgagtagttgggattataggtatttgttattatgtttggttaattttttgtatttttagtggagatgggggttttattatgttggttaggttgtttttaaattttttattttaggtgatttatttgtttttgttttttaaagtgttgggattataggtgtgagttattgtattcggttatgtgatgggaatgttttgtgtttataatagatgttgtatattgttggtttagtttttgaggttttttggatttttaggaatcggtgtttttattaggaatttttaattttgattcggatttttagttgggattcggggtgtcggagtggtaagagcgttgttaggtttggtgaagggtgtgagttgtttaacggggtagggaggaggtagggtttgttttgtagttggatagatagagttttttagttgttttttggaagattgaagggtaggtgatgttggagggagggagtgtaggtaggggttgtgagggagtttaggttagaaataggtggcgtttggatttaggttgtggtggttacggtggggatgaggggttgttttggattgtgttggggatgtggggtggtgcgttgttgtatgattattgttaggtttttttgtttttagtgtttgtatttagggttgggagggggttaaatgaattatattatcggttttaggtttattaagtttggggaggtggttatttttttatgatggtatttggatgttttttgtgtgtggggagggtatagggattttattcgtagattatttttgggatagtgtgtttgtttttgaggttagacgttttgtattgggatagggtggagtggagggaaatttagtttggggtttattggaggggtttgttggtagatatcgttttttgtgggaaattgattgtgggagaggggaattttaatttttgttattatattttttttttttgttgttatatttgttatttgttgttatagttatgagattttttaagggttattgttgttatttattgtatagtttggaagggagtttataggggatatatagtgagtaagagatttgtgttatttaggttttttgggggtgtttttagtgtagttatgatgataattatagttattatttattaagttttgtttatagtttaatttattttatttataatatttttagtagtaaggtaagtgaggtgttgtcgttatttaggttggatagtttagtgatttgtttgaggttttatagtaggtgagtggtaagtttagtattagagtagggtaggttggcggtgttttttgagttttttttgttatgttgattatatgtatattttgggtttttgtaggaatgttttgttttttatttgttttgtttcgtgtaaaattttttttgagttgtgtttgggagatatgttgagagaatttatggaaataaatgtgttattgatagtttttttgtttttaga

SEQ ID NO: 125 - DNA, 5286 bp, Artificial Sequence
  chemically treated genomic DNA (Homo sapiens)
tttggaggtaaagaggttgttagtaatatatttgtttttatgaatttttttagtatgttttttaggtatagtttaaagagggttttgtacggagtagggtaggtaggggatagggtatttttgtagaagtttaggatgtgtatgtggttagtatggtaaagggggtttagggggtatcgttagtttgttttgttttgatgttggatttgttatttatttgttgtggggttttaggtaaattattgaattgtttagtttggatgacggtagtattttatttgttttgttgttgggagtgttgtgaatagagtaggttagattgtgggtagggtttggtgaatggtagttgtgattattattatggttgtattggggatatttttaggaggtttgagtggtataggttttttgtttattgtatgttttttgtggatttttttttaggttgtgtagtgagtggtagtagtgatttttgggaagttttatggttatggtagtaggtgataggtgtgataatagggaagagggatgtggtgatagaggttggggttttttttttttatagttagttttttataaagggcggtgtttgttagtaagtttttttaatgagttttaagttggatttttttttattttattttgttttagtgtagagcgtttgattttagaggtagatatattgttttagaggtggtttacgaatggagtttttgtgttttttttatatatagggaatatttaaatgttattatggaagggtggttatttttttaggtttggtgggtttggggtcgatagtgtgatttatttgatttttttttagttttggatgtagatattaagagtagagagatttggtagtagttatgtagtagcgtattattttatatttttagtataatttaaagtagttttttatttttatcgtgattattatagtttgaatttaggcgttatttgtttttgatttgaatttttttatagtttttgtttgtattttttttttttaatattatttgttttttagttttttagaaagtagttagagggttttgtttgtttaattgtagaataggttttgttttttttttgtttcgttggatagtttatattttttattaggtttgatagcgtttttgttatttcgatatttcgggttttagttgggagttcgggttagggttaagggtttttgatagagatatcgatttttggaggtttaaagagttttaggagttgggttagtaatatgtagtatttattatggatatagaatatttttattatatggtcgggtgtagtggtttatatttataattttagtattttgggaggtagaggtaggtggattatttgaggtgaagagtttgagaatagtttggttaatatggtgaaatttttatttttattaaaaatataaaaaattagttaggtatggtggtaggtgtttgtaattttagttatttaggagttgaggtaggagaattgtttgaatttaggaggtggaggttgtagtgaggtaagattgtattattgtattttagtttgggtaataagagtgaaatttcgttttaaaaaaaatgtaaaaaaataaaaataaaaggatatttttattataagttatggggtaggggtttggtttggttagtgatttcgttttagtatgatagttttttgtattaaggaagttatttagtttcgtttattgggtcgggttatgttgagtgttttggagggtatggttttattttttttaggtttagggttatgagttgagttttcggttagggttttggggtggtttaattatgatttagtttcgtttgtttgttaatttgtttatttaaaggtttaagtaggttgttggaggagtaggggatatttagttaggtttagattgttgggaagaatagggaggggagtaggtagtgttgggttttgttttttttttttagggtaggttagtaagggagggtgggtttagttttttataggtagatgttttcggatcggaggaagatattttgttgaggttttgggtttttattttttatttttttattttaaaaatttattgaaagaatgtttaagtttagaggtttggtttttatttaaatagcgtgagagttgtatatattaggggaaattgaggttagaaagtaggttagttgttatggttggttttaaatttagatttttttttttgggattttgatgggtttatttgaggtttggggatagtgggggtttaggagagtattttttttttagaagatagttttgggttgtattcgttggggaggaagagatagatttgtttgtttgggaaagttttagttatagaattggttgggtttttcgttattttttagagtggtttagagttacgtttgtggttttttgtagtattttttagggggttttcgaattgggattgggatttgggggtggttattttcgaggaggagtagaggtagggaaggagtaggagcggttagaggatttatgagtttatttagtttaagagattagttagggcgtgtttagtagtttcggcggatagtgggaggtatttgtatagggtgtaggataggtaggttttttacggaggtttagtttggttgggaggatggggaagttgacgttatagtagtaaggaggcgtatagtgatttggtatggtgattcggtttgttattacgtgattaaagtttacgtagttttgggagggttttggatggtaggtgttatgagtcggggaaagggtttttttttttttagatttagttttttttaaagggcgttgtttgtttacgagtttttttagtgagttttaggttggttttttttggttttttttgtttttgtttagaatatttgaatttatagttagtgttttagagatggttttggaggcggtggagtagtggtgtttttggtattagattagaatttagtttaaggggttttattatacgttgttgttaatgttaaaggtgtgtttcgggaatatggtttggggttttgagtgtagattggttttgttgtttatttagaaatattagtattttaggtttaaggaattattcgaatagtttagaaaggtagggtttagagagggtttgagttggtttaagtttatagagtttagtagtgtaggtttggttatttggtaattgttttaagttattgtatgtttttgattagtttattaagaagtttgagttaggaatagttgcggatttagtttaggggattttggatagtgttgtttatttttttgtggtttttatttgttaaggatatgggttagagtttttttgagttatggtttttttttttgtttttgggtttgttgtgtttacggtgtcggagagtttttgtagtttttatttgaggtttatttcgtgtttataatatttattttataattatgtttttaggttgttttagttgatagaaggggatatgaaggttgatttaatattgttgtttgtttgggttatataggtttgttttgttatttattgtttttaaatgggttttggatagaatttattagatatataattgtgagatttttaatagttttagggtggaggtgttgtgattaagtttttttttaggttattttttttcgtgaagattagggtgattgggaagatgatagggtaggaattaaggttttatgatttgtttttgaaggttagatagttaataggaatattaggggatttggttttgttaagtggttgtattttatggtagttagttaggaggggtttaaagtggagagttatagggttttgttttttgtttcggtttgtttagtagttttttttttgtttgagagtatataagatatgtatgtttttatttataggttggaattaaataatgagaatatttggatataggaaggggaatattatatattggggtttgttgtggggtgaggggaacggggagggatagtattaggagatatatttaatgtaaatgataagttaatgggtgtagtatattaatatggtatatgtatatatatgtaataaatttgtacgttgtgtatatgtattttagaatttaaagtataattttatatatataatattatatataatatatttatatgatatattatataaattatataaatataatatatgatatattatataaattatataaatataatatatgatatattatataaattatataaatataatatatgatatattatataaattatataaatataatatatgatatattatatgtaatatattatatataatattatatattatatataatatataatatatattatataatattatataatatataatatatattatatattatataatatataatatatattatatattatataatatataatatatattatataatatataatatataatatatattatatattatataatatataatatatattatataatattatataatatataatatatattatataatattatataatatataatatatattatataatattaaatatataatatatattatataatattaaatatataatatatattatataatattatatatataatatatattatataatattatatatataatatatattatataatattatatatataatatatattatataatattatataatatataatatatattatataatattatataatatataatatatattatataatattatataatatataatatatattatataatattatattatatataatatatattatatattgttatataatatataatatatattatataatattatataatatataatatatattataatattatataatatataatatatattatataatatataatatatattatataatatataatatatattatataatatataatatatattatataatatataatatatattatataatatataatatatattatataatatataatataatatatattatataatatataatataatatatattatatattatataatatattatatattatataatatataatataatatatattatatattatataatatattatatattatataatatataatataatatatattatataatatattttatatattatatattatatataatatataatatattatatattttatatatatatatgatatataggatttatagtagtaggtgggtagaaagaaagtttgagtgggtaaaggatg

SEQ ID NO: 126 - DNA, 5649 bp, Artificial Sequence
  chemically treated genomic DNA (Homo sapiens)
cggtggtttatatttgtaattttagtattttgggaggttgaggtaggcggattataaggttaggagatcgagattattttggttaatatagtgaaatttcgtttttattaaaaatataaaaaattagtcgggtgtggtggcgggcgtttgtagttttagttattttggaggttgaggaaggagaatggcgtgaattcgggaggtggagtttgtagtgagttaagatcgtgttattgtattttagtttgggcgatagagttagattttattttaaaaaaaaaaaaagaaaaaagaaaatattttaagttttgaggattatatagtttttgttgtaattatttatttgggttattgtagtataaaaataaatatagataatatatatatgagtgagtatggttggggtttaataaaattttatttatataagtaggtgatgaattacggtttatagtgttttaatttttgatttagatggtgaattattatgagttttcgttgtttttttcggtagaaatatgggagaaattatagagagaaatagagattttaggaaaatagtaaaattaaataaataaagtgagacgtcgttttttttggaggttgtaggttgtgttgaatttgtgtgtgtttgggtgtatagggatgtgagtagatgcgcgtggagatgtgtgtgtgggtggagattgagcgtggttggaggtggttgtggtaggatgttagaaggaaggagtttgtatttagtttttttattagtattttttggagttgttgaggggatgttattgttgaatattgattttggtgtaggttaaatcgaagttagtttttgttattttttgttgggtgaggtattggggagaatagtgggattgaatggggcgggtttttttttttttatattttttttggaaatatttagtattagtatattagaatatggggagttattttttttagcgttgttttttaaggttcggaaggggaaattttgattttaagttttgtttgaagagcgatagtaaaggggagaggttggttgtggtttggtggtgtttattttttttttttgttttgaaattataggttggtatattattcgagagaatgattagtgttattaagggaagggtataagtttattggttttaggggagatattttaggggataggaatattttttgacgttgaatgagtgtagtatatagacggagaatatatataagagaaattatgaggatatgagagaaggtattggtaataggaagttataaaaagtaataaaaagaaagagtagatataaaaataataatcgaagaaagttaataatagatgggatgaattatacgaggtatgcgatttatggatgaagaggtgagtgatgagattagttggggaatttttttttaggaaagataaattagaagaaatataaatgatatcgaagtggttaggcgtagtggtttacgtttgtaattttagtattttgggagttcgaggtaggtggattatttgaggttaggagtttgagattagtttggttaatatgatgaaattttgtttttattaaaaatataaaaattagttaggtgtggtggtaggtatttgtgattttagttatttaggaggttgaggtaggagaattatttgaattaggaagtagagattgtagtgagttgagatggtgttagtgtattttagtttgggtagtagagtgatagtttgtttaaaaaaaaaaaaaggtagtaaagtgataggaggatagattagaagggttattttttagatagtgtaaggaagaaagaagaagaagaagaggaggaggaggaggaagaggaagaagacggagaagagggtattttagaagaaataatggagatatattttttaaaattgaagaaagatgattaattttagatcgaaggttaagaggtaaattagagagatagtttggtaagttaggaagagtattaaagttagataattagagtgaaattaaagaaaatttaaggtgataaaaatttaaaaagtttttttgtgattttagtttattggtgaaaatttaaaaaaaaaaaaaaaaaaaaaaggatagtttgggtaatatggtgaaattttatttttataaaaaatataaaaattagttgggtgtggtggtatatgtttgtagttttagttattcgagaggttaagtaaggtaggaggattatttggggttaagagttttagattagttgcggtaatatatatgttgtgggaagttaggtatttcgaacggagggattggttgaagttatggtagaagaatataaattgtgaagattttatggatatttattatttttttaattaatatttttgtgattttttatgtttgtttttaattttttaattttgttattttcgtaaattgaggatgtatgtcgttttaggattttgtgatgattgcgttaattgtataaattgtttgtagaggataattgttgtgtgtttgagtaatgtgaaatttgggtattttaagaataggataatagtaatttttagggaataagggagataattttaaagtttggttgtttgtgggttgggtaggatagagttatattttttttattatcgtaaataggtaagagaaatatcgttgaattttttttttagtaaggaatattaataattaatagttttgagaaaagaatgtatttttagggtcgggttattgaaatggtttttttgagagtgtttgtttttatttagaagtagaaagggatgaaatacgttttagttttttgtagtatttttagatttgataggattaggaaattttagtttggtaaattttagttagatcggttttttgtttttgaattttgatagtgcgtgttagtgggatttggaagtttattagtgattttagtttcgtcgtgattttttgttttgtgattttttgtcgtttttgaagtatgtgatttttgtgatttatattttgttcgtgtatttttttttttttgaaaattgttaataaaaattcgttggttttacggtttagggggtattacggaatttgcggatatgtgatgttttttttggatattcggttttaaaatgttttttttttgtattttttttttttattttttaggttagtcgatatttagggaaaataggaaaggatttacgtgaaatattgggggttgaatttttttcgataataagttttttaaaaaagatttttaaatgaaatttttttgttttttaatttttatttttgttttgggggtatatgtgaaggtttgttatataagtaaattcgtgttttcggtgtttgttgtatagaatattttattatttaggtattatgtcgagtatttaatagtttttttttttgtttttttttttttttttattttgtattttggagttaattatagtgtttgttgtttttttgtttgtgttataagtttttattatttagtttttatttataagtgagaatatttagtatttggatttttgtttttgtattagtttgttaaggataatagtttttagttttatttatgttttataaaagatatgatttagttttttttaatggttgtattaaatgaagttttaaagatataatataaatattaattttttttttattataaaaattttttgttgaatttgattatatttaaattaacgagttttgttttatgaaagattttttggataaatttgatagttgatggaataggagaagttgtttgttatgtttaaagttaataagagattaatatttagaataaatggagatttgtaaattaatagaaagtaggtagtaaagttaaagaaaatagtttaaggtatagttattaaaaggaacgtgattatgttttttgtagggatatgggtggagttggaagtcgttagttttagtaaatttatataggaatagaaaattagcgagatcgtatggttttatttataagtgggagttgaataatgagaatatatggttatatggcggcgattaatatatattggtgtttgttgagcggggtgttggggagggagagtattaggaagaatagttaagggatattgggtttaatatttgggtgatgggatgatttgtatagtaaattattatggcgtatatatttatgtaataaatttgtatattttttatatgtattttagaattttaaataaaagttggacggttaggcgtggtggtttacgtttgtaattttagtatttttgggaagtcgaggcgtgtagattatttaaggttaggagttcgagattagttcggttaatatggtgaaatttcgtttttattaaaaatataaaaattagttagatgtggtacgttatttataattttatttattcgggaggttgaagtagaattgtttgaattcgagagcggaggttgtagtgagtcgtcgagatcgcgttattgtattttagtttgggttatagcgtgagattacgttataaaataaaataaaataatataaaataaaataaaataaaataaaataaaataaaataaaataaaataaaataaaaaaataaaataaaataaaataaaataaaataaagtaatttttttttttttaagcggtttttattttttttttttgttttgtgaagcgggtgtgtaagtttcgggatcgtagcggttttagggaattttttttcgcgatgtttcggcgcgttagttcgttgcgtatatttcgttgcggttttttttttgttgtttgtttattttttaggtttcgttgggatttgggaaagagggaaaggttttttcggttagttgcgcggcgatttcggggattttagggcgtttttttgcggtcgacgttcggggtgtagcggtcgtcggggttggggtcggcgggagttcgcgggattttttagaagagcggtcggcgtcgtgatttagtattggggcggagcggggcgggattatttttataaggttcggaggtcgcgaggtttcgttggagtttcgtcgtcgtagttttcgttattagtgagtacgcgcggttcgcgttttcggggatggggtttagagtttttagtatggggttaattcgtagtattaggttcgggttttcggtaggtttttcgtttatttcgagattcgggacgggggtttaggggatttaggacgtttttagtgtcgttagcggtttttagggggttcggagcgtttcggggagggatgggatttcgggggcggggagggggggtagattgcgtttatcgcgttttggtattttttttcgggttttagtaaatttttttttgttcgttgtagtgtcgttttatatcgtggtttattttttagttcgaggtaggagtatgtgtttggtagggaagggaggtaggggttggggttgtagtttatagtttttcgtttattcggagagattcgaatttttttattttttcgtcgtgtggtttttatttcgggttttttttttgtttttcgtttttttcgttatgtttgtttttcgttttagtgttgtgtgaaattttcggaggaatttgtttttttgttttttttttgtatttttgattttttttcgggttgttgcgaggcggagtcggttcggtttttatatttcgtattttttttttttcgtagt

SEQ ID NO: 127 - DNA, 5649 bp, Artificial Sequence
  chemically treated genomic DNA (Homo sapiens)
gttgcggggagggagaagtacgagatgtggggatcgggtcgatttcgtttcgtagtaattcggggaggggttaggagtgtagggagggaatagggaaataggttttttcgaagattttatataatattggggcggggagtaggtatggcgggagaggcggggaataggaaggaggttcggggtaaaagttatacgacggagggataagggggttcggattttttcgggtgggcgaggggttgtgggttgtagttttagtttttgttttttttttttgttagatatatgtttttatttcgaattgggaaatagattacggtgtagggcggtattgtagcgaataaagaaaagtttgttggagttcgggggaggatgttaaggcgcggtgagcgtagtttgtttttttttttcgttttcggggttttattttttttcgaggcgtttcgggttttttgaaagtcgttaacggtattggggacgttttgggttttttaggttttcgtttcgggtttcgaggtgggcgaggagtttgtcgggagttcgggtttgatgttgcgggttggttttatgttgggagttttgagttttattttcggggacgcgggtcgcgcgtatttattggtggcgaagattgcggcggcgaaattttagcgaagtttcgcggttttcgagttttataagggtggtttcgtttcgtttcgttttagtgttgagttacggcgtcggtcgtttttttggagggtttcgcggattttcgtcggttttagtttcggcggtcgttgtatttcgggcgtcggtcgtagaggggcgttttggagttttcggagtcgtcgcgtagttggtcggggaagttttttttttttttttaggttttagcggggtttagggagtaaatagatagtaggaagaggatcgtagcgaagtgtgcgtagcgaattggcgcgtcgggatatcgcggggggaaattttttaagatcgttgcgatttcggagtttgtatattcgttttatagggtaggggagaggggtggaggtcgtttagaggaaaggaaattgttttattttattttattttattttattttatttttttattttattttattttattttattttattttattttattttattttattttgtgttattttattttattttatgacgtagttttacgttgtggtttaggttggagtgtagtggcgcgatttcggcggtttattgtaattttcgttttcgggtttaagtaattttgttttagtttttcgagtaggtggaattataggtggcgtgttatatttggttgatttttgtatttttagtagagacggggttttattatgttggtcgggttggtttcgaatttttgattttaggtgatttgtacgtttcggttttttaagagtgttgggattataggcgtgagttattacgtttggtcgtttaatttttatttgaagttttggggtatatgtagaggatgtgtaggtttgttatataggtgtgtgcgttatgatggtttgttgtatagattattttattatttaggtattaagtttagtattttttagttattttttttggtattttttttttttagtatttcgtttaataggtattagtgtgtgttgatcgtcgttatgtgattatgtgtttttattgtttagtttttatttataagtgagattatgcggtttcgttggttttttgtttttgtgtgagtttgttgaggttaacggtttttagttttatttatgtttttgtaaaggatatgattacgttttttttagtggttgtgttttaggttattttttttggttttgttgtttattttttgttgatttgtagatttttatttattttagatattgattttttgttggttttagatatgatagatagttttttttattttattaattgttaagtttgtttaaggagttttttatgaaataaaattcgttaatttaagtgtaattaaatttagtaagggatttttgtggtggggaagaggttggtgtttatgttgtatttttaaaattttatttaatgtagttattaaaaagaattagattatgttttttgtgggatatggatggagttagaggttattatttttagtaaattaatgtaggaatagaaatttaaatattggatgtttttatttgtaagtgggagttaaatgatgagaatttataatataaataaggaaataatagatattgtggttgattttagggtgtaggatgggaggaaggagaggagtagaaaagagaattattgggtattcggtataatatttgggtgatgaaatattttgtataataaatatcgaagatacgagtttatttatgtaataaatttttatatgtatttttaaaatagaaataaaagttaaaaaataaagaaattttatttaaaagttttttttaagagatttattatcgggggaaatttagtttttaatattttacgtgggtttttttttattttttttaagtgtcggttggtttgagaaataaagggaaagagtataaaagagagatattttaaagtcgggtgtttaggggagatattatatgttcgtaggtttcgtgatgttttttgagtcgtaaaattagcgagtttttattagtaatttttaaagaggagggagtgtacgaatagggtgtgggttatagagattatatattttaagggcgataaaagattatagggtagaaggttacggcgaaattagaattattaatgaatttttaggttttattggtacgtattgttagggtttaagagtagagaatcggtttgattagaatttgttaggttggaattttttaattttattaagtttgggggtgttgtaggagattagggcgtgttttatttttttttatttttgaataaaggtaggtatttttagggaggttattttagtggttcggttttgggaatgtattttttttttagggttgttaattattaatattttttattggggaaagaatttagcgatattttttttatttgtttgcggtaataagagaagtatggttttgttttgtttagtttataggtagttagattttaaggttattttttttgttttttgaaaattgttgttattttgtttttaagatgtttagattttatattgtttaaatatataataattgttttttataaataatttgtgtagttaacgtagttattatagggttttaaggcgatatatatttttagtttacgaagatgataggattaagagattaaagataggtataggaaattataagagtattgattggggaagtgataaatgtttatgaaatttttataatttatgtttttttgttatggttttagttagttttttcgttcggggtgtttgattttttataatatgtatgttgtcgtagttggtttggaatttttggttttaagtgatttttttgttttatttagtttttcgaatagttgggattataggtatgtgttattatatttagttaatttttgtattttttgtagagatggggttttattatgttgtttaggttgtttttttttttttttttttttttttaaatttttattaatggattgaggttataaggaagttttttaaatttttgttattttgggttttttttaattttattttaattgtttagttttggtgttttttttggtttgttaagttgtttttttggtttgttttttggttttcggtttgaggttggttatttttttttagttttgagaaatgtatttttattgttttttttgagatgttttttttttcgtttttttttttttttttttttttttttttttttttttttttttttttttttgtattatttggaaaatggtttttttaatttatttttttattattttattgtttttttttttttttagataggttgttattttattgtttaggttggagtgtattggtattattttagtttattgtaatttttgttttttggtttaagtgatttttttgttttagttttttgagtagttgggattataggtgtttgttattatatttggttaatttttgtatttttagtagagatagggttttattatgttggttaggttggttttaaatttttgattttaagtgatttatttgtttcgggtttttaaagtgttgggattataggcgtgagttattgcgtttggttatttcgatgttatttgtgttttttttggtttgttttttttgggagagagttttttagttgattttattatttatttttttatttatgagtcgtatatttcgtatgatttattttatttgttgttggtttttttcgattattgtttttatatttattttttttttttgttgttttttgtaattttttattgttagtgtttttttttatgtttttatgattttttttgtgtgtatttttcgtttgtgtgttgtatttatttagcgttaggggatgtttttgttttttgagatgttttttttggaattagtgagtttgtgttttttttttggtggtattggttattttttcgggtagtatgttagtttgtggttttaaagtaaaggaaggagataagtattattaaattatagttaattttttttttttgttatcgttttttaaatagagtttgaggttagagttttttttttcgaattttgggaagtagcgttggggaaggtggttttttatgttttaatgtgttggtgttgggtgtttttaggggaagtgtgggagggagaaagttcgttttatttagttttattgttttttttagtgttttatttagtagagggtagtagaggttaatttcggtttagtttgtattagggttagtgtttagtagtgatatttttttaataattttagagagtattaataaaggaattgaatgtaaattttttttttttggtattttattatagttatttttagttacgtttagtttttatttatatatatatttttacgcgtatttatttatatttttgtatatttagatatatataggtttaatatagtttgtagtttttaggaggggcgacgttttattttatttgtttaattttattgtttttttgaaatttttgtttttttttgtggttttttttatatttttatcggagagggtaacgaaagtttatgatagtttattatttaaattaaggattgggatattatggatcgtggtttattatttgtttgtgtaaataaagttttattgggttttagttatgtttatttatgtgtgtgttatttatgtttgtttttgtgttatagtggtttaaatgagtgattgtaatagagattatgtggtttttaaagtttaagatatttttttttttttttttttttttttgagatggagtttggttttgtcgtttaggttggagtgtagtggtacgattttggtttattgtaagttttatttttcgggtttacgttattttttttttttagtttttagagtagttgggattataggcgttcgttattatattcggttaattttttgtatttttagtagagacggggttttattgtgttagttaggatggtttcgattttttgattttgtgattcgtttgttttagttttttaaagtgttgggattataggtgtgagttatcg

SEQ ID NO: 128 - DNA, 1631 bp, Artificial Sequence
  chemically treated genomic DNA (Homo sapiens)
ggatttagaatatggggcggatttaggtagcggcgggaattaggcggattcgtttggatcgaagttttcgttaggtatcgaagtcgtgaagtcgtttgcgtagtaaagggagttttcggggggcgttcgagattttggtgtcgttcgggggtcgttggtagtcgcgttcgttgtttttcgttcggtgatttagtcggtatttttggcggggttatgggggttagaggatagcgcggggggcggcgagcgcggttgttaagttttttaaggtttcggagggataggatttgggcgtattttatcggttgttatggtaacgtagcgttttagtttttcgcgtttcgcggtggagggaggcgtagttaatcggaagcggcggagttttcggggattttttttttttcgttttacgtcgtgtgtgggcgggggttaggaggtgcggggcggaggcggagcgtgggtcgcggagattcggcgttcgtaggaggtttggtgcgcggcggggttgtacggggttattttcggagtagtattgcgagtagcggcgcgatagtgcggggtttttttttttttagaagagacgttatttatataaatttgatttttacgtggggcgcgggattttgcggggttttagtcgtaggcgtttttgttgtttttttcgggcgggtgggttggagaagaagtttacgcgggattttttaaaacggcgtatagggggattttagggttttatggttatttttttggatttttcggaggcgttgtttagttatttttagtcgttttgatgattcgtcgtgggtttttttaggagattcgaaagtttagggcgggttgtgtgggtaatatttttgtttaggttttcggagggttttacgtggttgtttttggagtattttagagcgttagggttgcgggaaggggcgggtgtgtttttggaaatatgagcgtttgttagtattagtgtttggatagggttggggataaattagtttatgtcgcgtatatcgaatttatgcgtttgagtgagggtgggtgtgttggggagtgcgtttaagtggatagtgtcgtatagtaatgtttacggggagttttaggagagttcggttatttttgcgtaggataattttttttttattattcgagtttcgtgttcgcgggtaggattttttcgaattggggttgtgtgtttagaaatacgtatatgggagcgtttagtttaaagttttagggtttttgggattcgcgtgttcggggtcggggttttaggtgggtataggtgggagggcgaatttgcgggtagggtgggttttttttcgcgggtttagtatttgtgcgtttttagtttaggtgcgcgggaggaaggtagcggtttgtcgcgtagagttttgcgcgttcgcgaggtggcgttatagtcgtagtagcgttcgtcggttcgggtcgttttagataagagtgtgcggaaagcgcggcggggttgagacgcgattaggacgcggggaggacggattagtaggatagatcgatcgggggttcggcgggcggagggtagcgtagttacgttttttttggattcgtcgttagtcgggttcggggttttcgatatgttttttaggtgggttttcgag

SEQ ID NO: 129 - DNA, 1631 bp, Artificial Sequence
  chemically treated genomic DNA (Homo sapiens)
ttcgaggatttatttggggggtatgtcgaaagtttcgggttcggttgacggcggatttaggggggacgtggttgcgttgtttttcgttcgtcgggttttcggtcggtttgttttgttggttcgtttttttcgcgttttggtcgcgttttagtttcgtcgcgtttttcgtatatttttatttggagcggttcgggtcggcgggcgttgttgcggttatggcgttatttcgcgggcgcgtagggttttgcgcggtaggtcgttgtttttttttcgcgtatttgagttggaggcgtatagatgttgagttcgcggggaggggtttattttattcgtaggttcgtttttttatttgtatttatttgggatttcgatttcggatacgcgagttttagaaattttggggttttgagttgagcgtttttatgtacgtatttttaggtatatagttttagttcggaaaagttttgttcgcgagtacgggattcgggtggtgggggagaggttattttgcgtaggagtagtcgagtttttttggaatttttcgtagatattattgtacggtattgtttatttggacgtattttttaatatatttatttttatttaggcgtatggattcggtgtgcgcggtataaattgatttgtttttagttttatttaggtattgatattaataggcgtttatgtttttagaagtatattcgttttttttcgtagttttagcgttttgggatattttaggggtagttacgtagggtttttcgggaatttgggtagaggtgttatttatatagttcgttttgaattttcgggttttttaaaggaatttacgacgagttattagggcgattggaagtggttggatagcgttttcggggggtttaaagaagtaattatggggttttagaatttttttgtacgtcgttttgaagaatttcgcgtggattttttttttaatttattcgttcgaaggaaataataggggcgtttgcggttgggatttcgtaaggtttcgcgttttacgtgaaggttaggtttgtgtgggtgacgttttttttgggagaaaggggatttcgtattgtcgcgtcgttgttcgtagtattatttcggaagtggtttcgtgtagtttcgtcgcgtattaagttttttgcgaacgtcggattttcgcggtttacgtttcgttttcgtttcgtattttttgattttcgtttatatacggcgtggagcgggggggggggggttttcgagaatttcgtcgttttcgattggttgcgtttttttttatcgcggagcgcgaggggttggggcgttgcgttattatggtaatcggtgaggtgcgtttagattttgttttttcgaggttttggagagtttagtaatcgcgttcgtcgtttttcgcgttgttttttggtttttatggtttcgttagaggtatcggttgagttatcgggcgaggggtagcgggcgcggttattagcggttttcgagcgatattaaggtttcgggcgtttttcggaggttttttttgttgcgtaggcgattttacggtttcggtgtttggcggaggtttcggtttaaacgagttcgtttgattttcgtcgttgtttgagttcgttttatgttttggattt

SEQ ID NO: 130 - DNA, 6680 bp, Artificial Sequence
  chemically treated genomic DNA (Homo sapiens)
tttataagtttgtttgtgtatatatgaagaaatttttggatatataggaaattgattaatagagattatggtgggggagtggttggtagagaatttggaagataaggagggttttttatattttatttttaaattatgtgaatgtgttatttatttaaagtgttatatgagagtttttgattagaggttatattttttagtttgtaagaatggttattttataggttgtaaatttttatgagaaataaagtttttttttttaaatttatgaatagattaattagtttaaggaatattttattgattttaaattggattttttcggtttagcgattgaagattgatatagttcgatcgtttcggaagttttttgggttattatggacgtcgagtttcgggtaatttttatagtggaggataggaatgttaggtttttgagtttaagttaagttattatatttttagtgatttgtacgtatatattaagatggtttgaagtaattgaagatttatagaagtgaaaatagttttaattgatgatattttattattgtgatttgtttttgttttattttaattgattaatgtattttgtaattttttttatttttaagaaggttttttataatgttatttatttttaagaagtttttttgtaattttttttatttttgagaatgtattttgtgagatttattttttgtttttaaaatattgtttttaattttattgtttattttaaaatttataagaattaatgataattttattattttttgttgatttttttttcggatttagttcgtttgtatttaggtgaaataaatagttttgttgtttaaaaaaataaaaataaaaataaaaataaaaaataaagtgttaaatgaattgaatttaattttatgggaagagttaatttagtaattataatttttattaaagggtgaaagtttaatagttatttatttatttaataatttatagtaggttaggtatcgcggtttacgtttgtaatttttgtattttgggaggtcgaggtaggtggattatttgaggttaggagtttgagattagtttgattaacgtgatgaaattttatttttattaaaaatataaaaaattagttgggtatggtggcgtatatttgtaattttagttatttaggaggttgaggcgggagaatcgtttgaatttgggaggcggaggttgtagtgagttgagattgtattattgtattgtagtttgggtaataaaagtaaaatttcgttttaaaaaataaaaataaaataatttatagtaattaggaaatatttttagtaatgatatttaataagtgtatagtattttaaatgtgttaggtattgtgttgtttttatttatattattttatttaatttttattatttttagagtgtaagtgtttaatattatagaagagatagaagattatagaaggatgagagaggttgttttttttttttttttttgtgagacggagttttgttgtgtcgtttaggttggaaggtagtggcgtgaattcggtttattgtaatttttattttttaggtttatgttatttttttgttttagtttcgtgcgtagttgggattataggcgttcgttattatgtttggttaattttttgtatttttagtagagacggggttttatcgtgttagttaggatggtttcgattttttgattttgtgattcgtttgttttagttttttaaagtgttgggattagaggtgtgagttagcgtgttcggttaagaggttgtttttttttaaagttttttgtaaatatttaggcgttattattttgggttaggtttgaggatgggtattgtattagggatattaagataaagatagtattttgttttttaggatttaatggtttagtgagggagatcgatgtgtaaaatagtagatttatagataggttttgaatagagaagggagtgttagagtatagtgtttgaggattaggagataaagggaatagagagatcggggataataagtaaattttttttacgatattttttggtcgaggataggtttcgaaagtagttgtggaatttggaggcgttatgtgggagataaattttgtagttttaagtttaataatgaataaaggttgtcgggttttttggtaggagaggagatttgataacggtttggttcgtcgtttgattagtgtagatattttttttagattttgaagtttgaagtgtttttttttagttgtttatatagattaaataagttggatgattgttttatttttatttcgttgtgtggttttatagttatagttagttttataataatttaattaaattatttgagtagaagtaaaaataatttttatgggtaaagatagatagttttaagatgtgaatattaattttttgttgttattttagaagagagtggattttgaagttcgttttaggaagttttcgagaagggcgattttgtttttttttaaggtgaagtggtaaaattgttgtttttttttatagttgaaagttttttttattttaaggtttatataggatatttataaaagttgataataatgagttgtgatttggtttttgggaaggtagttttattttaaagaataaggattagattgggtgtggtggtttatgtttgtaattttagtattttgggaggttgagataagaggattgtttgaatttaggagttcgaggttaatttgggtaatatagtgagattttgttttaattttttttaagttaaataataataataataataataataataataataataataataataataaaaggataggaattttattttaaaagtatttttttatttaaaggtttattttaggggaaattttaatttagtttttttagtttttaagtagttgtgaggagtttggaatattgttatagattggtagaattaggtattttttaataaatttagaagttaagtggtattgttaaaaaagattaaaaatgaatatgagttttaatatttacgttttttgttatggtttttatggaaatagatatttgttttagggagaaagaaaatgtggggggaagtagtgtaagtgtttttaaattattagtgttttgaaagatttattttttttttttgttataatattaatagttaggaatgtgagatttttgtgtggtaatttattgtatttaaaaaaatgtattaaatgagtgggatttttttttgtgaatttttagattaaatataaagattttaagataaaaagtttgtttagtgggtaaggattttttgggtttgggttttttgtttatttgtgttgtttgtttatttgtcgtttttttgaggggttttatgtttatttttttttaatttttttaatgatgtttgagattttgtttagaaaaatgatagacggaagtatttagttattttgaagttaagtttggtttgagaagaagttttttaaggtttagtatttgaattatttttggttttgtttataggttaagtgaaaattatttcgattggtttgggggggaggtcgattttatataagggcgattgttggaaaaaatgtcgtaataagtatattttaggtaatagcgtattgttaattgtttgttttgtgtagtgtgttgttgtttgtatgatttagtttttattgttttgggtattttttagttgtattttatttttggtatatttttggtgattaattaggtatgagagtttttttaaattaggattgttgttttaggaaggttggttatatttgttttttgatttggggagatgtagtttattaataaaataaagatattttttttgtttagttaagattttaaagtaggtgttttggtgtattgattattaatcgaggatacggttttggttagagaatgggaggaggcggggattatgtttattttatttattttttttttttttttgtgagagaaagggttagttattttaaggtacggttagattaattttttttgtgtttttgttgaggttttgagttatttaggttagggagaatagtgattttgtggtttttttttcgatttttaaaaagaatttagtgttgttttggggagtacgtgttttgagaataaaagtaatatttaattgtaatttgtgtagtttagaacggttattgtttttttttttttattattcgtagaaggtttggaagaatagatggagtttgtatttaagttgagtggttttgttagattaaaggcgattaaattttagagttttacgttttttcgtataggtttttggttatcggttcgggaatttgaggatgttggtaagaacgtatatagtgagggaagggttacgttcgcgatttgtgggttgagtggattagaaattacgatgatgttataatatgggtgatacgtcggtgtcggtgtagggtgtcgggggtagggggttttgtaggggcgtggagtggtattgtgttgttataggggttcgggcgttttaggtatttatgtgggtggcgtattagaaggggtattgttttgttcgagtgttgtttttggggcgaggcgggtatgtggttttataaggtggagtttaggcggttaaagtttggaaaggtagggaaggattttttcgtttttcgtttgtttcgttttgtttttgttttcgagaatggggagttggttcggatttagttcggggtttattgttacgtttttttttacggcgagattatttttttagttttaggtttatatttggggatgttttttaggcgttttgtaattttcggtattgtttttttgtttttcgggataggattatatttttcgaggtgtttcggggtttcggggggcggcgttttacgcgggttgtggggggcgggggcggtacgtgtcgtcgttttcggttaatgcggagtttcgcgcggaggttacgtgtttttgtttggcgtttttgtgcgcgttcgggtttgttggtgtttagagtgtggttaggcggttcggattgagtaggtgggtgcggggttcggaggaggcggcggttggttgaggttagtaagagggacgcggtcggcgggaggggttgggtcgtggtagcgattttttgttgtagggcggcgggcggggttgcgggtttcggaggggttggtgggcgggggtcgtttcgttttgtgtgtggttcgggcggagtttcgtttttgttttcgtttttcgggggcgcggttgttcgtgggtagggggttgggcgattatcgggcgttcgtttcggggtgtcgtcgaggagataatagggggcgtgggttttcgtttattttttttttttttttttttttttgcgggtttcgtcgggttttttattgtttgaagggacggggcggtgttttagggattagcggttttaggattaaattgcgggtagttagggtcgcgattttttttgcgatcgttttttggcgatcgtagttggtgattgaggggcggcgttttcgggttttacgagggtttttttgttttcgcggtcggacgcgcggatagcgtgggtggcggtaggttgggtatggggacggcgggaggcggtggcgagtttatcgcgggattattcgggggtttgttttcggggtttgttttattcgttgaattgtgaagggggtggtggcggcggtttggaggtgtttttggcgggagttggggggggcgttcgcgtagggggagttaggtaggggcggagttattcggattggatcgttagtttcgtttattttttttttttttacgcgcgcgggtttcggggtgttgagttcggggagattcgaaaaggcgcggggaggaagggggcggggttaggggtcggagcgtaaggcgtgttttgattggtcgggggcgatcggttttttttttttcgttcggattagggttacgtttattttgggttcggtgttgcgtttaattttttgttttttttaaattttgtcgttgtttttgattttaatttttagtttttgggaatttgttattttacgtttttggtattagttggcgtttataaaagttataatgttaaaaagattaataagagatatagtattttttatgatataacggtagtaaatataagttaaaatttagaggtttataaatattttgtttgttgttgggtaaggaagtttaaatttgagggataataggagtttaatattattggttattattagtttgggcgtttttttatttattacgttagatatagataaagtaggggtgggtattttatttgtataatgagttgtaggtagtattaagatggtttcgggggtattgttgagttgaatttggaatatttttttatagtttcggtgaaatgttaaagagtttatgggggaaaaattttttatttttgtgattttgtttgattttaaaaatttaagagttttatgatcgagaaagtttagttaatttgattttttggaattaatattatatttaggttatattttttaatgtttatttagtagattttgataatttttttcgtggttaatttagacgtttttattttacgtatttttttgacgatgtatgtagatgtgatgtgagatttttttgggttgatgatatatagaaaggtaaagaaagtgattgtatgtttttgaaaattatttttagg

SEQ ID NO: 131 - DNA, 6680 bp, Artificial Sequence
  chemically treated genomic DNA (Homo sapiens)
tttgaaaatgatttttaaaaatatgtaattattttttttgtttttttatatgttattaatttaaaaaaattttatattatatttatatatatcgttagaaaaatacgtggaataaagacgtttaaattaattacgaaaaaaattattaaaatttattaaataaatattgggaaatatgatttgaatatgatattggttttagaaaattaagttaattgagttttttcggttataaaatttttggatttttaaaattagataaagttataagggtgaagaattttttttttataaattttttaatattttatcgaaattgtaagaagatattttagatttaatttaatagtgttttcggagttattttaatattgtttataatttattgtgtaaatgaaatatttatttttgttttgtttgtgtttgacgtggtggataagaaaacgtttaagttaatagtaattaataatgttgaatttttattgttttttaggtttaagtttttttgtttaatagtaagtaaaatgtttatgaatttttagattttgatttatatttgttgtcgttatgttatgaaaaatgttgtattttttgttgatttttttaatattatgatttttgtagacgttagttagtattaaaaacgtaggatgataggtttttaaaagttaggaattaaaattagaggtagcgataagatttaagaaaagtagagaattagacgtagtatcggatttaggatgggcgtggttttggttcgggcgaggaaaagaggatcggtcgttttcggttaattagagtacgttttgcgtttcggtttttggtttcgtttttttttttttcgcgttttttcgaattttttcgaatttaatatttcggagttcgcgcgcgtgggaaggggaggggtgggcggggttaacggtttaattcgggtaatttcgtttttgtttgattttttttgcgcggacgttttttttaattttcgttaaaaatatttttaggtcgtcgttattattttttttatagtttagcgggtggggtaggtttcgggaataggttttcgggtggtttcgcggtgagttcgttatcgtttttcgtcgtttttatgtttaatttgtcgttatttacgttgttcgcgcgttcggtcgcgaagatagaagaattttcgtggggttcgggagcgtcgttttttaattattagttgcggtcgttaggggacggtcgtagggagggtcgcggttttggttgttcgtagtttggttttaaagtcgttggtttttggggtatcgtttcgtttttttagataatggggaattcggcggggttcgtagggaagggagggagggagggaggtaaacgagggtttacgttttttattgttttttcgacggtatttcggagcggacgttcggtgatcgtttagttttttgtttacgaatagtcgcgttttcggagagcggggataaaggcgaggtttcgttcgagttatatataaagcggagcgattttcgtttattaattttttcgaggttcgtagtttcgttcgtcgttttgtagtagggggtcgttgttacggtttagtttttttcgtcgatcgcgttttttttgttggttttagttagtcgtcgtttttttcgagtttcgtatttatttgtttagttcgagtcgtttgattatattttgagtattaatagattcgggcgcgtataaaagcgttaaatagaggtacgtgattttcgcgcggggtttcgtattggtcgagagcggcggtacgtgtcgttttcgttttttataattcgcgtggagcgtcgtttttcgggatttcgaagtatttcgggaagtgtagttttgtttcggagggtaggaggataatgtcgggggttgtagggcgtttggggagtatttttaggtgtgggtttgggattaggggggtggtttcgtcgtggaagagggcgtggtagtggatttcggattaggttcgaattagttttttattttcgagaataagggtagggcggagtaggcggagggcgggggggtttttttttatttttttaaattttggtcgtttggattttattttgtagagttatatgttcgtttcgttttaagggtagtattcggatagagtagtgttttttttagtgcgttatttatatgggtgtttaagacgttcgagtttttgtgatagtataatgttattttacgtttttgtagggttttttgttttcggtattttatatcgatatcggcgtgttatttatattgtgatattatcgtaatttttaatttatttagtttataggtcgcgggcgtggttttttttttattgtgtgcgtttttgttagtatttttaggttttcgagtcggtgattagggatttgtgcgggaaagcgtggggttttggaatttgatcgtttttggtttaataaagttatttagtttaaatgtagattttatttgtttttttaagttttttgcggatgataggggaggaagagtaatagtcgttttagattatatagattgtagttaagtgttgtttttgtttttagagtacgtgttttttagagtagtattgggttttttttaaaaatcgaaaaaggagttataaggttattgttttttttgatttggatagtttagaattttagtaaaggtataaaggaaattggtttgatcgtgttttagaataattggtttttttttttataaaaaggggaaaaaaataaatgaaatgaatatggttttcgtttttttttattttttgattaagatcgtgttttcggttggtggttaatatattaagatatttgttttgagattttgattaagtagaagagatatttttattttattaatgagttgtatttttttaaattaagaaataaatgtgattaatttttttgaaataatagttttaatttagaaagatttttatgtttagttagttattagggatgtgttagagataaaatataattaaggggtgtttaagataataaaaattggattatataagtagtagtatattatataaagtaaataattagtaatgcgttgttgtttgaaatatgtttgttgcggtattttttttaataatcgtttttgtgtggggtcggttttttttttaagttaatcgaagtggtttttatttagtttgtgagtaggattaggaataatttagatattgagttttgaaaggtttttttttagattaaatttagttttaaaatggttaggtgttttcgtttgttatttttttgaatagaattttagatattattagaaaagttggagaaggatgggtatgagattttttaggaaagcgatagataggtaggtaatataaatgagtaaggaatttaagtttaagaggtttttatttattgaataggttttttattttgaagtttttgtatttgatttggaggtttatagaggaaggttttatttatttaatgtatttttttaagtataataaattgttatataaaagttttatatttttgattattaatgttgtgatagaaaaaagaaataaattttttaaaatattgataatttgaaagtatttatattgtttttttttatattttttttttttttagagtagatgtttatttttatggaaattatagtaaggaacgtagatgttagaatttatgtttatttttaattttttttagtaatgttatttggtttttgggtttgttgggagatgtttggttttgttagtttgtgataatgttttaagttttttatagttgtttgaggattgagagggttgggttaaagttttttttagaatgagtttttgaataaaaaggtgtttttgaggtgggatttttgtttttttattattattattattattattattattattattattattattattatttgatttaaaaaaaattgagatagggttttattatgttgtttaggttggtttcgaatttttgggtttaagtaatttttttgttttagttttttaaagtgttgggattataggtatgagttattatatttagtttgatttttgttttttagggtggggttgtttttttaagagttagattatagtttattattgttagtttttgtgggtgttttatataagttttggaataggaagggtttttaattgtaaggagagataatagttttgttattttattttggagaggggtagaatcgtttttttcgaaagttttttaaaacgaattttaagatttatttttttttgaagtggtagtaaggagttaatgtttatattttggaattgtttatttttgtttataagaattatttttgtttttgtttagatggtttggttggattgttatggagttggttgtgattatggagttatataacgaagtggagatagggtagttatttagtttatttgatttgtgtagatagttaaaggagagtattttaggttttaaagtttagaaggaatgtttatattgattaaacggcgggttaggtcgttgttagatttttttttttgttagagagttcggtagtttttgtttattgttgggtttgaggttgtagggtttgttttttatatggcgtttttaagttttatagttgttttcgaggtttgttttcggttaaagggtgtcgtgggagaggtttgtttgttgttttcggtttttttgttttttttgttttttaatttttaagtattatgttttaatatttttttttttatttaaaatttgtttatgagtttgttgttttatatatcgattttttttattagattattaggttttagagggtagggtgttgtttttgttttggtatttttagtgtagtgtttatttttaggtttggtttaggatgatggcgtttgaatgtttgtagagaattttgggaaagaataattttttggtcgggtacgttggtttatatttttaattttagtattttgggaggttgaggtaggcggattataaggttaggagatcgagattattttggttaatacgatgaaatttcgtttttattaaaaatataaaaaattagttaggtatggtggcgggcgtttgtagttttagttacgtacgaggttgaggtaggagaatggtatgaatttgggaggtggaggttgtagtgagtcgagtttacgttattgttttttagtttgggcgatatagtaagatttcgttttataaaaaaaaaaaaaaagaataattttttttatttttttgtgattttttgttttttttgtgatattagatatttgtattttgggagtggtgaggattaaatgaaataatgtaaatgaaaatagtataatgtttggtatatttaaagtgttgtgtatttgttaggtattattgttagagatgttttttgattgttatagattattttatttttattttttgagacggagttttgtttttgttgtttaggttgtagtgtagtggtgtaattttagtttattgtaattttcgttttttaggtttaagcgattttttcgttttagttttttgagtagttgggattataggtgtgcgttattatgtttagttaattttttgtatttttagtagagatggggttttattacgttgattaggttggttttaaatttttgattttaggtgatttatttgtttcggttttttaaagtgtagggattataggcgtgagtcgcggtgtttggtttgttataggttattgaatgagtgaatgattattagatttttattttttgatggaaattgtagttattgggttaattttttttatggggttaaatttaatttatttaatattttattttttatttttatttttatttttatttttttgagtaataaggttgtttattttatttggatgtaggcgggttgagttcgaaaagagagttagtaaagggtggtgggattattattggtttttataggttttgggataggtagtagagttaagagtaatgttttgggggtaggggatggattttataaagtatatttttaagggtggggagaattataaagaaattttttaagggtgggtgatattataaagaatttttttaagggtgggggagattataaagtatattgattagttaaggtggggtagaaataaattataatggtggaatgttattagttaaggttatttttatttttgtggatttttagttgttttaggttattttgatatatacgtgtaggttattggggatatgatggtttagtttgggtttagaggtttgatatttttgttttttattgtaagagttattcgaagttcggcgtttatgatggtttagggggttttcgaggcgatcgggttgtgttagtttttagtcgttaagtcgagaagatttaatttaaaattagtgagatgttttttgggttggttggtttgtttataaatttggaaaggagagttttattttttataaagatttgtagtttatagggtggttatttttataggttgggaaatgtagtttttggttagaagtttttatgtaatattttaaataggtaatatatttatatggtttaaaaataaagtataagaagttttttttattttttaagttttttattaattatttttttattataatttttgttaattagttttttgtgtatttaggagtttttttatgtgtatataagtaaatttgtagg

SEQ ID NO: 132 - DNA, 16842 bp, Artificial Sequence
  chemically treated genomic DNA (Homo sapiens)
ttttttaaagtgttgggattataggcgtgagttattgtatttggtttgttatttatgtatttatttttttttgagataagtttttgttatgttgtttaggttggttttaaatttttaggtttaagagatttttttaaagttttgggattataggtgtgagttattgtgtataattttgaagtggttaattttaataatatatttattttagtttaatatatttaaaattatattattttaatatgtaattattattaaaattattaatgagatattttattttatttttatttatttatttttttgagacggagtttcgttttgttttttaggttggagtgcggtggcgcgattttggtttattgtaagtttcgttttttgggtttacgttttttttttgttttagtttttcgagtagttgggattataggtgttcgttattacgtttagttaatttttgtatttttagtagagattaggttttattacgttggttaggatggtttcgaatttttgatttcgtgattagtttattttggttttttaaagtgttgggattataggcgtgagttattgtgtttggttagtgagatattttatttgtgttttttttttttttttttgagatcgagttttattgtgttgtttaggttgtagtgtagtggtataattttggtttattgtaatttttgttttttaggtttaagcgatttttttattttagttttttgagtagttgggattataggcgggcgttacgatatttggttagtttttgtatttttagtagagacgggggttttattatgttgtttaggttggttttgaatttttgattttaggtgattatttgttttggttttttaaagtgttgggattataggtaaaagtcgttatattaggtttatttttttttttttcgagacggagttttattgttgtttaaggtggagtgtaatggtaagattttagttttttgtaatttttgttttttgggtttaagcgatttttttgttttagttttttaagtagttgagattacgggcgttcgttattacgtttggttaatttttgtatttttagtagagatagggttttattacgttggttagattggttttaaatttttgatttcgggtgatttattcgtttcggttttttaaagtgttgggattataggtgtgaattatcgtgtttggtaggtttatttttaatttttttaattttggaaatttagtgtgtagggtaggtatggtgttttatgtttgtaattttagaattttgggaggtcgaggtaggtggattatttgaggttaggagttcgggattagtttgaataatatggtgaaattttgtttttattgaaaatttaaaaattatttagttatggtggtgtatgtttgtagttttagttattttagaggttgagataggagaattgtttgaatttgggaagtagaggttgtagtgaattaagattatgttattgtattttagttcgggtaatagagcgagatttcgttttaaaaaaaaaaaaagagagttagtgtggagggaagtgtttttgttgggttcgggtgttttgtgggattttgaggaaaagttcgtattaggtagatgttgttttgtttttatgggtaaaggatattttaataaatcgaggagtaaaatgttttcgtatgtttttttcgcgtagatttgttaggaagagtataagaagaaatattcggatttttttgttaatttcgtggaattttttaagaagtgtttggagagatggaagattacgtttgtaaaggagaagtgaagtttgaagagaaggtaaaaagtgataaagttcgttgtgatagggagattaaaaattatattttttcgaaatgtaagaaagggtaagaaaggaaagaaaaaggatcgtaatgtttttagaaggttattatttgttttttttttgttttgttttgaatatcgtttaaagattaaaagtggatatttaggtttatttgtcgtggaaattgtaaagaaattgggtgaaatgtggtttgggtagttagttaaagataaataattatatgagtagaaagtagttaagttataggagagatatgaaaagggtattgttgtatatcgtgttaagggtaaaagtgaagtaggaaagaagggtttaaagaagaataaattagaagatgaggaggaggaggaggagaaagaagatgaagatgaggaggaagagggtgaagatgaagaataaatggttattttttaatgatgtttgtgtagtgggtttgttttgttaagaatgtgaattttagtatagtttagtattagttttagtataaaattgtataaattttcgtatagtttataagattttttgtatagaaaatattttttttttttttttttttttttgagatagagtttcgtttttgttgtttaggttggagtgtaatggcgtgatttcggtttatcgtaattttcgtttttcgggttttggtttaagtagtttttttgttttagttttttgagtagttgggattataggtatatgttattacgtttagttaatttttgtatttttagtagagatggggttttattatgttggttaggttgtttttaaatttttgatttcgtgattcgtttgtttcggttttttaaaatattgggattataggtgtgagttatcgtattttgtttaatgtttttaaatatttaatggtttttaaaaaatttattgtgtatggtagtatagtatatttgtaggaattagtattaatagtatattttgcgttttttaagatgttgtattttttaatattttgtaataaaattatgcgtattaaaaaaataaagaaatttcgtgtgtagtttatatttatagtatattttcgtttaggtatttgagagaatgattaggaggggtttttggaggaggtggtttttgaacggagaatttatttttaaggattttgtttgtaatggttattaagtattttttgagttatttttatgtgttttgtagttttttgaaggggcgtgggatttatcgatgttaattatttagtattatttttagattttaagaagttggggtgtgagttagtaattagtatagaaaagagatattaaaataagtttgagttggggagtgtttttttaattttagttttttggaagagattttttttttttttttgagatagagtttcgtttttattgtttaagttggagtgtagtggtacgatttcggtttatcgtaatttttttttttcgggtttaagcgattttttttttttagttttttgagtagttgggattatagatatgtatttgtaatttttattaaaaatataaaaattagtcgggcgtggtggcgtacgtttgtaattttagttattggggaggttgaggtaggagaatcgtttgaaattaggaggcggagattgtattaagatagtttgttttagttaaataatttggcgttagtgtaggaaaaggtggaaggtacggggttagtataggagggtttaatatttttaattttattaagttatattttggtaatttttgttttttacgagaagttttcgttgggtttgttttagcgttgttttgaggttttttttatgagtttcgatagggtagaggtcgttttgagcgttttttttttttttggtttaagagtggtttaaaagaaggatttttgattggaattggttattttgtgttattttttgatttttgatttcgttttaaagggggatgcgggggaggggttttggtaggggtggtttcgttttttttaggttcgtaagtttaggttttcgtttatcgggtttagtttattttgcggtcgtttagggaggtcgttggtattcgtgatttacgatttttttttcgagttttatcgaggttatagtcgtggtttcgtttttttatgtttgtttttcgttttttgttcgtgacgggcgttttcgaggattaatgagcgcgttgtatttatttttcgggcggggttaagcgtcgattaatcgtcgttcgggcgttcggtcgggtttaaacgttttaatcgttagcggcggcggggcgggtagagggtcggggatggtaggtttaattaacgggtgggtacgtcgttttcgcgaggaggcgtgttttgcggtcgggcgtgcggtgttcgcggcggcgtagggagggggagggaggtaaataagatggcggcggcgtgtcgggcgcggaagggggaggcggttcggggcgttcgcgagtgaggcgcggggcggcgaagggagcgcgggtggcggtatttgttgtcgcggttttggatgggttgggtttttttcgtcgtttcgttttttttatacgcgcggcggtcgcggcgagggggacgcgtcgttcggggttcggtattttcgggaatttttcggttcggagtttgcggtttgcgtcgtttcggtcgtcgggagtttcgtggagttttcgtcgtcgcgtcgtttcgcggatcggacgttgagggtattcggggcggggcgcgcgttcgggtagacgtttgcggggaggggggcgtttgtcgggtttcggcgattattttgggggtcgcgggtcggttcggggggcgtttagtgcgggttttcgcgggcgtcgggtagcgattagttttgagcggagttgttggtcgcggcgggaggtttttcggacgtttttagtttttcgaacgttcgttcgggtcggcgggagtcggcgtttttcgggaggttcgttcggtcgttcgcggcggagcgtttgtttttgggataggcggtgggatcggggcgtcgtcggagacgtttttagcgaagttgggttttttaggtgtgggggtttcggggggtagcgacgtcgcggattcggtttgtgggatgggcggttcggagaagattgcgttcggtcgtgtttatatttgttcgtgggtttgaggttttcggaggatgatttagtattgaaaagtttcggtcggtttttttagggttttcgaggacgaagttgattttgatcgggtcgttttttagttttgaggttcgggttttattggaattcgcgtttgagtcgtcgtttcggattttcggtgttcgtcggttcgtagattttgtatcgggtttggattcgtagtcgggattgacgtgtagaataatcgtttttgttggaagaagggttttttttttttttttggggtttttgttgtttttttttttttttttttttttgtaaaattttggagaagggaagtcggaatataaggaaggatcgtttattcgcggatttagggttggcggcgggattttaggattttgggtttagtatggaggtggtggattcgtagtagttgggtatgtttacggagggcgagttgatgtcggtgggtatggatacgtttatttatcgtatcgattttatcgaggttatttattagtcgcgtcgtaagcgggttaagtttatcggtaagtatttgatgggggatttgttgggggaaggtttttacggtaaggtgaaggaggtgttggattcggagacgttgtgtaggagggtcgttaagatttttaagaagaagaagttgcgaaggatttttaacggggaggttaacgtgaagaagtaagtatggtttgttggggtcggggtcgggtcgggttagttacggtgttgatggttttgttttttttttttttttttttttttttttttttatttttttttaatattttgagttggattcgtttggcgtttgtgtttttcgtgttagggagagcgtggttgggggtttgcgttacggatttttatttaggtaaggttagttgtcgtagcggggcgtgcgtttgtatgggtttttggattttagttaaaatgttttggtagcgaaatttttttgagaagggagcggtttttaattttttaagattagttttttggtttttttagttgtttaaggagtagaggcgtttagtggaattagtttgtgtttgtttgggtttcgagagtttgtgtgcggtcgttaatacgttttttgcgtagtgtgtggtcgttatcggggttaggcgaaatgtgatttgtttattttgttagaggggaattttgggttgttaaaaataattgtttgtatcggtttattagttagtaggagggaaacgtagtttttttttatttgttagggatgtgacgttggaagtatttttggttttcggggttggaagttttgttcgagggggattgtgtttttttttcgaattgtattcggaagattttatttttttaattgatttttttaggtacggggttgtcgttgggtatttcggacgtttttgtatttgtgcgcggagaagtttttatttagggtagtattggtcggtttgagttttttttagttggtgggggtggtcgggggtgtttttgttttatcgtagttagatacgttgtatttgtcgtcgtttggcgggttttgtttaggttttgttttttttttagtttttttaatttttaaaattttgttttttgtttttaagaaaggattttatttgttgggttaggtttcgagggattggtaaggatattttgcgtagggtattatgattttggaaggaggttcggggaggggttgttgcggtgtttgtttttattttttttttgtttaggggttttggggtttttgtcgtgtttgtttttattttttttttgtttaggggttttggggtttacgtatatttttttttttttttttttgagacggagtttcgttttgttttttaggttggagtgtagtggcgcgaattgggtttattgtaagtttcgtttttcgggtttatgttatttttttgttttagtttttcgagtagttgggattataggtattcgttattacgttcggttaattttttgtattttttagtagagacggggttttatcgtgttagttaggatggttttaattttttgatttcgtgattcgttcgtttcggttttttaaagtgttggtattataggcgtgagttaacgcgtgcggtttttttttttttttttttttttttttttgagacggagttttatttttgttgtttaggttggagtgtagtggagtggttttggtttattgtaattttcgttttttgggtttaagtgattttcgtgttttagtttttcgagtagttgggattataggtgtttgttatagtgtttagttaattttttttttttttttttagtagagacggggttttattattttggttaggttggttttgaatttttgatttcgtgatttatttgttttagttttttaaagtgttgggattaaaggcgtgagttatcgcgttcggttagtacgttttttaattagtatgtaggttgtgatatgcggaaattaggggtataggttttgaagtttgtattttggagttggagtagttagggttaaatgggagcggttgggaagggtgtgtttttacgaggtttttttgatgttttagtgtttagtttggattcgggtagaaggtgtggttagtgttttgagttagtggagtagttgtttgtgtttggtttttgtgagatgggttggttaggggttaggtagagtttgtgtttggtttttgtgagatgggttggttaggggttaggtagagtttgtgttgggggtagtaggtgttttttaaaggggttagtgatagttttttttttagtagtgagaaatttacgtttaggggtcgggcgcggtggtttacgtttgtaattttagtattttgggaggttgaggtgggtggatcgtttgaggttaggagttcgagattagtttggttaatatggtgaaattttatttttattaaaaatataaaagttagtcgagtgtggtggcgtgtgtttgtaattttagttattcgggaggttgaggtagaatattgttggagtttgggaggcggagtttgcggtgattcgagatcgtattattgcgttttagtttgggcgatatagcgagattttgttttaaaaataaataaataaataaataaataaataaataaataaataaatttggtttgagttttgataaatgtatatgtagggttaatgggaagatagacgttggagggtggaagtttgattgtgagagtgagttttttgtttttttgaatagttagtggaggaggttttgggagtttaggtgagtatttgaacggtagggtagagtttgagggttttggtggagataggtaagaaggttgtaggaatttagtttggtttagtgtttgggagaacgggagggaatacggaggtagggaggtagaggggttggtaggatttggattggattgtgcgtcgtagttatttatagtttgattttattgttttgaagtgagtgatgtatttttattagtgtttagcgtttaattttattttggttttgagtgtgtaacggttttgtttttgcggggttttttgggatgaggggtgagttttgtttttttttggttattgtttgttattaggagttgtttcgtttatagttgtgatttaggagttattgtattttttttagttttttgggtgttgttagggggtttttttattttgggagttggtgtgttttgattggaggttgttatgtgtagagtgttgttaaggagaaggggtgtttattgtttagttttgaggtttaaggttttggttagttttgttgttagcgttgtagggaaaaagttttttttgtgtgtgggaagtttaataaatttcgtttagattgtgtttcgtagcgagtgtttggaattttttagataagttttaggcgttcggttttttagttggtgtggaaagcgtgggcgattattaaggggggtgggttggggtagatggagtcggcgtgagtttcgttttttttttttttttttagaaaggtagttttggagtttatgttttgtttcgtttttatcggtaaaaagtataattttattagaaataggaaagttttaaaaagtattaatgagttaaaaagagggttgggtatgttcggttatgtttgtaattttagtattttgggaggttaaggcgggtggattattcgaggttgggagttagtttgattaatatggtgaaattttgtttttattaaaaatataaaattagttgagtgtggtggcgtacgtttgtaattttagttattttggaggttgaggtaggagaattatttgaattcgggaagtagaggttgcggtgagttaagattatgttattgtattttagtttgggtaataagagtgaaatttcgtttcgaaaaaaaaaagggttggggtcgggcgtggtggtttacgtttgtaattttagtattttgggaggtcgaggcggtttgattataaggttagaagtttgagattagcgtggttaatatggtgaaattttttttttattaaaaatagaaaaattagttaggtgtggtggtatatgttaataattttagttattttatttgaggttaggagtttaagattagtttggttaatatggcgaaatttcgtttttattataaatataaaaattagttaggcgtggtggcgcgcgtttgtagtttagttattggggaagttgaagtaaggagaatcgtttgaatttgggaggcggaggttgcggtgagtcgagatcgtattattgtattttaggttgggtaagtttaggagagaagagcgaaattgtgttttaaaaaaataattaattaaaataaaattagtgttataggttgtttttggtaggtagtgggtttttagggtggagtagggaagggttggaaagggtcgtttgtgtttagttcgatttttcgtgtttttcgggggatagtacggttagttgttgttgcggagtttatagtggggttttgggggggggggtgtaggtagaaggtcgttatgtttttttttttttttttattttagtgagagtgggttcgaaggtagggagtttgttcgttttgtggagttttcgtagaggtatttagggttgtcgtgagcgtatagtttggcggtgttttacggttttgtttttttttgttatttttatttgttgtaaaatattgtgttttcgtattttttttttttatttgtttggaaatgtgaaaattattgttgtcgtaggaaacgggtttagattcgggttgtggtttttttattcgtatcgttttcgcggtgtttagttaggaggtgggaggtgggcggtatttagtgtgtttggttgcggcgatgattggtagatgtttggatttatggtaaagaggattttcgcgagttgggagttagttttggattttgtaggtttttatattttaggcggtttttatggggttttagtatttgttgaggtttttgcgttagttatgtgaggtttgggtgttttcgaggtttttgtttgtgtttttttttgggtagcgggagggagagttttgagatttagagggagtttaggggttgggtagtcgtagaatagcgggggtaatgggtttattgggggttttgggttgtgtatatagtgggttttcggtgtttagttagttggggtaggtttggaatgttggttttttttttaggatttggggcgttgttgtagttgtcggggaattagtgaggcggttggacggttcgtatattttataaacgttatcgtattgtttaaattggatttaatttttttaatatttttttttttttttttttttttttttttggagatagggttttattgtatcgtcgaggttggagtgtagtggcgtaattatagttttgggtttaggtgatttttttgtttttaaggtagttgggattgtagatgtgtattattatattcgattagttttttgtagagatggggtttcgttatgttgtttaggttggttttaaatttttagatttaagttattcgtttgtttgggttttttagagtgttgggattataggtatgagttattgtttcgttacgtttatttttatttatttatttatttatttttgagacggagtttcgttttgttttttaggttggagtgttgtggtacgattttggtttattgtaagtttcgttttagttttttaagtaagttggaattataggtgtttgttattaagtttggttaattttgtttttgtatttttagtagagacggggttttatcgtgttagttagtatggtttcgattttttgattttgtgattcgttcgtttcggttttttaaagttttgggattataggtttgagttattgtgttcggtttatttttttattttttattttatagagataagggtttgttgtgttgtttaggttggttttgaatttttgattttaagtaattttttttggttttttaaagtgttgggattataggtgtaagttatagtattgggtttaaagtttattttttttttttttttttttttttttgagatggagtttcgttttgttatttaggttggagtgtagtggcgtgattttggtttattgtaagttttgtttttcgggtttatattatttttttgttttagtttttcgaatagttgggattataggcgtttgttattatgttcggttaatttttttgtatttttagtagagatggggttttattgtgttagttaggatggtttcgattttttgatttcgtgatttgtttgtttcggttttttaaagtgttggggttataggtgtgagttatcgtattcggtaaagtttatttttttaaagtgtgtaatttagtggtatatagtatattgatagagttgtataattattatttttattagtttttagaatatttttgttattttagaaggaaatttcgtttttgttagttattattttttattttttttttagtttcggtatttacgtattttttttttgtttttggattggtttgttttgaatattttatacgagtggtgttatatatcgcgtggttttttgcgttcggtttgttttacggagtgtgttgtttttaaggggtattcgcgtcgtggtttgggttcgaatttttttgttgtttacggttgcgttattttttagtgtgtggagggttacgttgcgtttgattgtttatttgtggttggatatttgggttgttttcgtttttgtttgtgaattgtggttgttttggtgtacgtgtgtttagtcggcgtttttttagaatttttgagggttttgttttagttatattaggagggatttagggattagggtacgcgggtttggagttgggtgtttttgggtttttatgtgttttttagttttgttttgagtcgtgggaggtcggggcgagggttaggtttattttttttttgtatgatttgtttttaggtagacggaggtttttagttttatttttttgtgagtttgagtggcgtttatgatttttttttttattttttgttttgttaattaataagttagttaaatagtttatgttgtttgggtaagtttagtaggtttttaacgtggtatttcggagcggttggcgatgttttaagagtcgggttttttttttttggaggttttttttgtttttcgttaagtttttaggtttcgttgggtttttttttttgttttttttttggttggagacgttagaggaagtttggcgatttagagaagttgatgtgtatttattatttcggaggtgattgttattaggcgggggtggttttatttttattttttttttggtataaatcgggggacgtacgtgtttgcgtagaatgttttggttttttttaattaaatagataatttagtgttttttggtttatgttgatttgtttaggagtgtttgggtttttttacgttttagttgttgtgtgttttgttgttgtgaagtgttttcgttgaggtggaggtagggtagggcgttttcggtgagggcgagtttttttgtgttcgtttttttatttgtagaatgatggtttatggaggagatatggtgtcggtaggtggtggtcggcgtagggaggtttttaggagggagttttttatttttatttgtttttagggtcgtgtagtttttcgagcggtttttacgaggttttgaggttgtatgtaggttgagtttttggttttattgtttttttttagggttaggattgtgttggagtttgggtgggtgtggggtggtttttgtataggtagtaggaggtgggttagagcggtgttggatttgaaggttcgtggtttttttagttttattgaggaggttggaatagtgttttgggttattttttttgtcggtagtcggtttttgttgagggagggggtgttttcgttttttggtggagtattaggtttttggggtttgtgcgttcgagtatttggtttttgttgtttgaaaatagtatttttttcgtttttcggttatcgtattttttttgaatagaaggtaagttttgttttttaggaatggtttgtgatttttattagcgggggaggttaggggtatatagagttttggggaataaggggatttggggttgagtcgggtttttcgggtttatttcgagtttttttgagtagtttggtaggtaggaaggcgttgggtttcggggtttttgtcgagtttagttttatttttagcgttttttttaatgttttgggtgtttgttaggttgtggatataggttttggttagttttataaataattttgtcgggttttgttgggaattggtgttattattatatagtttagagagaacggaaatatagggttttttagcgagtagattaggtttgcggtgattagtggaagtgggggacgtttttagggttgggtagttcgatagggtatcgggtatagttaggggtcggaattagttgtttattggtttcgtttttgggggattgtgtttttttgtgtttcgtttttattatattttgttttttttttattttgtttttttagtttttttttagattggcggttttttgtttaggtttagttttagtatagtttgtagttttggtagagtttaggttttggttttttgaggttgttttgagggtagtgagtaatgagttttgggattggtgtattgggagggaaaggtgagttaaggttttttgtaagaggtagttttgagttgggggtggggaaggttgggtcgtgggatatttttgatattttaagttttttttttgagatggagttttgttttgttatttaggttggagtgtagtggtgagatttcgattttttgtaattttcgttttttaggtttaagcgatttttttgttttagttttttgagtagttgggattataggcgtttattattacgttcggttaatttttgtatttttagtagagataaggttttattatgttggttaggttggtttcgaatttttgattttaggtgatttatttcggttttttatagtgtcgggattataggcgtgagttatcgcgtttggttttttagttgttttttatgttttatgtttgggttttttgttaagaattaaaaaagaaaaaaaaaattatggagatggaatttatatattgtataatttattcgtttatagtgtataatttagtggtattaagtatatttatacggttgtgtaattattatttttaattttagaacgttcggttattttaaaagtaagttttatttttattgtgttattttttattttttttattagtttttggttattttgaatttattttttggttttggattggtttgttttggatattgtatagaaatgggattttgtcggtcgggcgcggtgatttacgagagtaagagatttagattattttggttaatatggtgaaattttatttttattaaaaatataaaaattagttgggcgtggttgcgggtatttgtagttttagcgatttaggggttgagttaggagaaatcgtttgaattcgggaggtagaggttgtagtgagttgagattatgttattgtattttggtttggcgatagagtgagatttcgtttttaaaaaaaaaaaaataagaaatgggattttgttattttagcgtttttcgaggtcgaggtgggtagatgatttgagtttagtagtttaaacgagattagtttgggtagtacggtgaaattgtttttattaaaatataaaaattagttgggtatggtagtatacgtttgtagttttagttatttgcggggttgagatgggaggatcgtttgagtttgggaggtgtattttagtttgggcgatagggaaattttgttttaaaaaaaaaaaaaaaagtgtattatatattgtgtgttttttagtgttttattgtgatatttttaaggtgtagttaggttgtggttcgagttagagttttattggtttttgtggttgagttttgttgagtgcgtggatgggttgtgttgattttcgtttgtggaagggtttttgggtggttttatatttcggttgttgtgcgttttgttgttgtgagtatttcgtgtttcgtttttgcgtggcgtgtattgttttttagggtgtgtatttgggagtggagttgttggtttatagggtaatagatttttggagaagttgtagacgtttttacgtttatttattgggtgtgaggattttgtttttcgttatttttgtttttgtttaatttttttttttatgagatagggttttattttgttgtttaggttggagtgtagtagtacgattataggtaattataggtttaagtgatttttttatttgagtttttcgagtagttaggatttgaggtacgtatttttatatttggttaatttttgtatttttagtagagatagggtttcgtcgtgttgtttaggttggtttcgaatttttgagtttaggtgatttattcgtttcggttttttatagtgttgggagaaatgaagtgtttgcgatagggcggtagttgtagagggggttgtgttttttggtttgttgtgttttatttttgtgataggtaggtgggcgtggttaattgggcggtagttgtagagggggtagtgataggcgggtgggtgtggtaggattttataatgtttttttttgtggcgttttttttttcgtttgtttttttttatgggttatttttttagtttatttgcggtttattttttaaggagtgggattttcggagttgggagtttttggttgcgtgggattgtattgtgtgacggagttattattagggttttaatttattttggtttttgttatagtttgggttttatttgtgttattattgtagtagtttggtttttaggaagtaaaattgttattgagttataaagtttaattaagagtgttttttgggaggtcgaggcgggcggattataaggttaggagatcgagattattttggttaatatggtgaaattttgtttgtattaaaatataaaaaaattagtcggttgtggtgatacgtgtttgtagttttagttattcgggaggttgaggtagggaaattatttgaatttgggaggtagaggttgtagtgagttgagatcgggttatcgtgttttagtttagggatagagtaagattttgttttagaaaaaaaaaaaagtgttttaattgtgttttttaaagttttcgtcggtcgatgatagattagagggcgttgtgtttttattttttatcgttttgagtttggacgcgtggtttttgtagggtttttttttatagtattgtgaatttatagtttttttttagggaagggaggaggtacgttatttttatagggagatggggaggtcgattttagggatttaggttattattttgacgttgggtcggttgatatatttttgttttttttgttttagg

SEQ ID NO: 133 - DNA, 16842 bp, Artificial Sequence
  chemically treated genomic DNA (Homo sapiens)
tttgggatagagaggataggggtgtattagtcgatttaacgttaggatgatggtttggatttttggagtcggtttttttatttttttgtggaagtggcgtatttttttttttttttagagagaagttgtgagtttatagtgttgtgggaaagggttttgtaggggttacgcgtttaggtttagggcggtagggggtgggagtatagcgttttttagtttgttatcggtcggcgagggttttggaggatatagttaggatatttttttttttttttgagatagagttttgttttgtttttaggttggagtacggtggttcgattttagtttattgtaatttttgttttttaggtttaagtgatttttttgttttagtttttcgagtagttgggattataggtacgtgttattatagtcggttaatttttttgtattttagtatagatagggttttattatgttggttaggatggtttcgattttttgattttgtgattcgttcgtttcggttttttaaaggatatttttaattgagttttgtaatttagtaatagttttgttttttagaaattagattattgtaatggtagtatagatggagtttagattgtggtaggagttagggtgagttggagttttggtgatggtttcgttatatagtatagttttacgtagttaagggtttttaatttcgagggttttattttttggagggtgggtcgtaggtgagttggaaggatggtttataggaaggggtaggcgaagaaggagacgttatagaaagagatattgtggggttttgttatatttattcgtttgttattgttttttttgtagttgtcgtttagttggttacgtttatttgtttgttataagggtggggtataataggttagagagtatagttttttttgtagttgtcgttttgtcgtagatattttattttttttagtattataggaggtcgaggcgggtggattatttgagtttaggagttcgagattagtttgagtaatacggcgaaattttgtttttattaaaaatataaaaattagttaggtgtggaggtacgtgttttaagttttagttattcgggaggtttaggtgggaggattatttgagtttgtagttatttgtgatcgtgttattgtattttagtttggataatagaataagattttgttttataaaagaaaaaattaaataaaaataaaaatgacgaggagtaaggtttttatatttagtgggtgggcgtggaagcgtttgtagtttttttaaaggtttgttattttgtgagttagtagttttatttttaggtatatattttgaggaatagtatacgttacgtagaaacggagtacgagatgtttatagtagtaggacgtatagtagtcgagatgtggaattatttaggggtttttttatagacgaggattagtatagtttatttacgtatttaataagatttagttataaaaattagtgaggttttgattcgagttatagtttagttgtattttgaggatgttatagtgagatattaaaggatatatagtgtgtgatgtatttttttttttttttttgagatagggtttttttgtcgtttaggttggagtgtattttttaggtttaagcgatttttttattttagtttcgtaagtagttgggattatagacgtgtgttattatgtttagttaatttttgtattttagtagagatagttttatcgtgttgtttaggttggtttcgtttgaattattaggtttaagttatttgtttatttcggtttcggaaaacgttgggatgataggattttattttttgtttttttttttttggagacggagttttattttgtcgttaggttagagtgtaatggtatgattttagtttattgtaatttttgtttttcgggtttaagcgattttttttgatttagtttttgagtcgttgggattataggtgttcgtaattacgtttagttaatttttgtatttttagtagagatggggttttattatgttggttaggatggtttggattttttgttttcgtgagttatcgcgttcggtcgataggattttatttttatgtaatatttaggataagttaatttagagttaggaagtggatttagagtggttaggagttggtggaggggatggagagtgatataatgggaatggggtttgtttttggggtgatcgaacgttttggaattagaagtagtggttgtatagtcgtgtgaatgtatttaatgttattgaattgtatattgtgaacgaatgagttgtatagtatgtaaattttatttttatagtttttttttttttttttaatttttaataggaagtttaagtatggagtataaaaaatagttggggggttaggcgcggtgatttacgtttgtaatttcgatattatgggaggtcgaggtggattatttgaggttaggagttcgaaattagtttggttaatatggtgaaattttgtttttattaaaaatataaaaattagtcgggcgtggtgatgggcgtttgtaattttagttatttaggaggttgaggtaggagaatcgtttgaatttgggaggcggaggttgtagagagtcgagattttattattgtattttagtttgggtgatagagtaagattttattttaaaaaaaaaatttggggtgttaggggtattttacgatttagttttttttatttttagtttagggttgttttttgtaggaagttttggtttattttttttttttagtgtattagttttagggtttattgtttattgtttttagggtaattttagaaggttaaggtttgagttttgttagggttgtaggttgtgttggggttgggtttggataaggggtcgttagtttggggaggggttaggagagtaggatgaagggaaagtaaggtgtgatggggacggggtatagagggatatagttttttagaagcggagttagtgagtaattggtttcggtttttggttgtgttcggtgttttgtcgggttgtttagttttgaaagcgttttttatttttattggttatcgtaggtttggtttgttcgttgagaagttttgtgttttcgttttttttgggttatgtggtggtggtattaatttttagtagggttcggtaaggttatttatagaattggttagggtttgtgtttatagtttggtaggtatttagggtattgagggggacgttgagggtgaggttgggttcggtaaaggtttcggggtttagcgtttttttgtttgttaggttgtttaggagagttcggggtgggttcgagaggttcggtttagttttagatttttttgttttttagggttttgtgtgtttttaatttttttcgttgatgaaggttataggttatttttgggaggtaagatttgttttttatttagaggagatgcggtggtcggggggcggggaaggtgttgtttttagatagtagaggttagatgttcggacgtataggttttaagagtttgatgttttattaggaggcgaaagtatttttttttttagtaggagtcggttatcggtagggaaggtggtttaggatattattttagtttttttagtggagttgagggagttacgggtttttaggtttagtatcgttttggtttattttttgttgtttgtgtagggattattttatatttatttaggttttagtatagttttaattttgaggaggggtagtgaggttaggagtttaatttgtatgtagttttagagtttcgtgggggtcgttcgggaggttgtacggttttaaaagtaaatgagggtggaggatttttttttggaaatttttttgcgtcggttattatttgtcgatattatgttttttttatgagttattattttatagatggggaaacgggtataggaggattcgtttttatcgaaggcgttttgttttgtttttattttaacggggatattttatagtagtaggatatatagtagttgaaacgtggaagagtttaggtatttttgagtaggttagtatagattaagggatattgggttgtttgtttaattaaaagggattaaggtattttgcgtaggtacgtgcgtttttcgatttatgttaggggaggagtgggggtggagttattttcgtttggtggtagttattttcgggatgatgggtgtatattagtttttttagatcgttaggttttttttgacgtttttagttagaaaaagagtagaagaggaggtttagcgaaatttaagagtttggcgaggaataggaagagtttttaggagggggaagttcggtttttggggtatcgttagtcgtttcgaggtgttacgttaggggtttattgggtttgtttaggtagtatggattgtttagttgatttgttgattagtaggataggaaataggaaggagagttataaacgttatttaagtttatagagaggtggggttaggagttttcgtttgtttagaaatagattatatagggaagagatgggtttggttttcgtttcggttttttacggtttagagtaggattgggaggtatatggagatttaggaatatttagttttagattcgcgtgttttggtttttgaattttttttgatgtggttgaaataaggtttttaaggattttagagggacgtcggttgagtatacgtgtattaaagtagttataatttataggtagaggcgggagtagtttaagtgtttagttatagatgagtagttaaacgtagcgtggttttttatatattggaaagtgacgtagtcgtgaatagtagagaggttcggatttaggttacggcgcggatgttttttgaggatagtatatttcgtgagataagtcggacgtaaaaggttacgcggtgtgtgatattattcgtgtgaaatgtttaggataggttaatttagaggtaggaagggaatgcgtgggtgtcgggattggggagggaatggggagtgatggttgatagagacggggtttttttttggggtaataagaatgttttggaagttgatagaggtgatagttgtgtaattttgttaatgtattatatgttattgaattatatattttaaaaaggtgaattttgtcgggtgcggtggtttatatttgtaattttagtattttgggaggtcgaggtaggtagattacgaggttaggagatcgagattattttggttaatatagtgaaattttatttttattaaaaatataaaaaaattagtcgggtatggtggtaggcgtttgtagttttagttattcgggaggttgaggtaggagaatggtgtgaattcgggaggtagagtttgtagtgagttaagattacgttattgtattttagtttgggtgatagagcgagattttattttaaaaaaaaaaaaaaaaaaaaaaaaggtgaattttaggtttagtattatggtttatatttgtaattttagtattttgggaggttagagaggattatttaaggttaggggtttaagattagtttgggtaatatagtaagtttttgtttttataaaataaaaaataaaaaggtgggtcgggtatagtgatttaagtttgtaattttaggattttgggaggtcgaggcgggcggattataaggttaggagatcgagattatattggttaatacggtgaaatttcgtttttattaaaaatataaaaataaaattagttaggtttggtggtaggtatttgtagttttagtttatttgggaggttgaagcggagtttgtagtgagttaagatcgtgttatagtattttagtttgggggatagagcgagatttcgttttaaaaataaataaataagtaaataaaggtgaacgtggcgaagtagtggtttatatttgtaattttagtattttgggaggtttaggtaggcggatagtttgagtttaggagtttgagattagtttggataatatggcgaaattttatttttataaaaaattagtcgggtgtggtggtgtatatttgtagttttagttattttgggggtaggagggttatttgagtttagagttatgattgcgttattgtattttagtttcggcgatatagtgagattttgtttttaaaaaaaaaaaaaaaaaaaaaaaaaaaggtgttaagaaaattgagtttagtttgagtaatacggtggcgtttgtgggatatacgggtcgtttagtcgttttattgatttttcgatagttatagtagcgttttagattttgagagaggaattaatattttaggtttgttttagttggttgggtatcggaagtttattgtgtgtatagtttagaatttttagtggatttattattttcgttgttttgcggttgtttagtttttgagttttttttgggttttagagttttttttttcgttgtttagagaggggtataaatagaggtttcgaggatatttaggttttatatggttggcgtaggggttttagtagatgttggaattttataaaggtcgtttgggatgtaaagatttataaagtttaggattgatttttagttcgcgaaaattttttttattataggtttaagtatttgttaattatcgtcgtaattaggtatattgagtgtcgtttattttttattttttggttggatatcgcgggggcggtgcggatgggagagttatagttcggatttgggttcgttttttacggtagtagtgatttttatatttttaaataggtagaaagaaaagatacgaaagtatagtgttttgtaataggtggaagtgataggaaagggtagggtcgtgggatatcgttaggttgtgcgtttacggtagttttgggtgtttttgcggaggttttataaggcgggtagattttttgttttcgagtttatttttattggggtggaaagggggagggaggtatggcggttttttgtttgtatttttttttttagaattttattgtgggtttcgtagtagtagttagtcgtgttgtttttcgagaagtacggggagtcgggttgggtataggcgattttttttagtttttttttgttttattttaggaatttattgtttattagaaatagtttatggtattgattttattttaattaattgtttttttgagatataatttcgttttttttttttaggtttgtttagtttggaatgtaatgatgcgatttcggtttatcgtaattttcgttttttaggtttaagcgattttttttgttttagtttttttagtagttggattataggcgcgcgttattacgtttggttaatttttgtatttgtagtagagacggagtttcgttatattggttaggttggttttgaatttttgattttagatgaagtagttgggattattggtatgtgttattatatttggttagtttttttatttttagtagagagagggttttattatgttggttacgttggttttaaatttttgattttgtgattaaatcgtttcggttttttaaagtgttgggattataggcgtgagttattacgttcggttttagtttttttttttttcgagacggagttttatttttgttatttaggttggagtgtaatggtatggttttggtttatcgtaatttttgtttttcgggtttaagtgatttttttgttttagtttttagagtagttgggattataggcgtgcgttattatatttagttaattttgtatttttagtagagatagggttttattatgttggttaggttaatttttaatttcgggtgatttattcgttttggttttttaaagtgttgggattataggtatgatcgaatatgtttagttttttttttaatttattgatgttttttggaatttttttatttttaataagattatattttttgtcggtgagagcgggataaggtatggattttagggttgtttttttgggaaggaagggaagagacgggatttacgtcggttttatttgttttaatttattttttttggtgatcgtttacgttttttatattaattggaggatcggacgtttgaggtttgtttggaaggttttagatattcgttgcgagatataatttgagcggagtttattaaattttttatatataaaggaggttttttttttgtagcgttggtagtaaggttggttaaggttttgggttttagggttgggtagtggatattttttttttttgatagtattttgtatatggtagtttttagttagaatatattagtttttagaataggaggattttttggtagtatttagggggttggaggaaatgtagtggtttttgaattatagttgtaagcggggtagtttttgatggtagatagtgattaggaagggatagggtttattttttattttagggggtttcgtaagggtaaagtcgttatatatttagggttaggatgaaattggacgttgaatattagtgagggtgtattatttattttaaggtagtggggttaagttgtgggtagttgcgacgtatagtttagtttaggttttgttaatttttttgtttttttgttttcgtgttttttttcgtttttttaggtattgggttagattaggtttttgtaatttttttgtttgtttttattaagatttttaggttttgttttatcgtttaggtgtttatttgagtttttaggattttttttattgattgtttaggaaagtagggggtttatttttatagttaggtttttattttttagcgtttgtttttttattgattttgtatatatatttgttaaaatttaagttagatttatttatttatttatttatttatttatttatttatttatttttgagatagagtttcgttgtgtcgtttaggttggagcgtaatggtgcgatttcgggttatcgtaagtttcgttttttaggttttagtaatgttttgttttagtttttcgagtagttgggattataggtatacgttattatattcggttaatttttgtatttttagtagagatggggttttattatgttggttaggttggtttcgaatttttgattttaggcgatttatttattttagttttttaaagtgttgggattataggcgtgagttatcgcgttcggtttttaagcgtgggttttttattgttgggagagagattgttattggtttttttagagggtatttgttatttttagtataggttttgtttagtttttgattaatttattttatagagattaggtataggttttgtttagtttttgattaatttattttatagagattaggtataggtaattgttttattgatttaaggtattggttatattttttattcgggtttagattgggtattgagatattagaaaggtttcgtggaaatatattttttttagtcgtttttatttaattttgattgttttagttttagagtataaattttagagtttgtgtttttggttttcgtatgttatagtttgtatgttgattaagaagcgtgttggtcgggcgcggtggtttacgtttttaattttagtattttgggaggttgaggtaggtggattacgaggttagaagtttaagattaatttggttaagatggtgaaatttcgtttttattaaaaaaaaaaaaaaaaaattagttgggtattgtggtaggtatttgtaattttagttattcgggaggttgaggtacgagaattatttgaatttagggggcggagattgtagtgagttaagattattttattgtattttagtttgagtaataagagtgaaatttcgttttaaaaaaaaaaaaaaaaaaaaaaaaaaaggtcgtacgcgttgatttacgtttgtagtattagtattttgggaggtcgaggcgggcggattacgaggttaggagattgagattattttggttaatacggtgaaatttcgtttttattgaaaaatataaaaaattggtcgggcgtggtggcgggtgtttgtagttttagttattcgggaggttgaggtaggagaatggtatgaattcgggaggcggagtttgtagtgagtttagttcgcgttattgtattttagtttggggaatagagcgagatttcgttttaaaaaaaaaaaaaaaaaaatgtacgtgagttttagggtttttgagtaggagagaggtgagagtagatacggtaggagttttagggtttttgagtaggaggaaggtgagagtagatatcgtagtagttttttttcggatttttttttaaggttatggtgttttgcgtagggtgtttttgttagtttttcgaggtttagtttagtagataaggtttttttttggaaataggaggtaaagttttgaaagttaagaaggttgggaaaggagtagggtttgggtagggttcgttaggcggcggtaggtgtagcgtgtttggttgcgataaggtagggatattttcggttatttttattagttgggagaggtttaggtcggttagtgttgttttaggtaggagttttttcgcgtatagatgtagaggcgttcgggatgtttagcggtagtttcgtgtttgaagaagttagttggaaaagtaaggtttttcggatgtaattcgggagggaggtatagtttttttcgggtagggtttttagtttcgggggttagggatgtttttagcgttatatttttggtaaatgaggaaaggttacgttttttttttgttgattgataagtcggtgtaaatagttatttttggtagtttagggtttttttttgataggataaataaattatatttcgtttggtttcggtaacggttatatattgcgtagaaaacgtgttggcggtcgtatataaattttcggggtttaaataaatataggttgattttattgggcgtttttgttttttggatagttgggggagttaaggggttagttttaggggattgggggtcgttttttttttaggagggtttcgttattagggtattttaattggagtttaagagtttatgtaaacgtacgtttcgttgcgataattggttttgtttgagtgaaagttcgtaacgtaggtttttaattacgttttttttggtacggaggatataggcgttagacgggtttagtttagggtgttaagaggaagtaagggagggagggaggagagaaggaaggaagatagaattattagtatcgtgattggttcggttcggtttcgattttagtaagttatatttatttttttacgttggttttttcgttggggatttttcgtaattttttttttttgaggattttgacggtttttttgtatagcgttttcgagtttagtattttttttattttgtcgtaagagtttttttttagtaggttttttattaggtatttgtcgatgagtttggttcgtttgcggcgcggttggtagatgatttcggtggagtcgatgcggtggatgaacgtgtttatatttatcgatattagttcgtttttcgtgaatatgtttagttgttgcgggtttattatttttatgttggatttagggttttggagtttcgtcgttagttttgagttcgcgggtgagcggtttttttttgtgtttcgattttttttttttaaaattttataaagaaaaaagaaaaaaaaaaggtaataaaaattttaaaaggaagggaaaaattttttttttaatagaaacgattgttttatacgttagtttcggttgcgagtttaagttcggtgtagggtttgcggatcggcgggtatcgggggttcgggacggcggtttagacgcgagttttagtgggattcgggttttagaattgggagacggttcggttagggttaatttcgttttcggggattttggggaggtcggtcggggttttttagtgttaggttatttttcggggattttaggtttacggataagtatgaatacggtcgagcgtagtttttttcgggtcgtttattttataggtcgggttcgcgacgtcgttatttttcgggatttttatatttggagagtttaatttcgttgggggcgttttcggcgacgtttcggttttatcgtttgttttaggagtaaacgtttcgtcgcggacgatcgagcggatttttcggggggcgtcgattttcgtcggttcgggcgagcgttcggggggttgggggcgttcgggaggtttttcgtcgcggttaatagtttcgtttagggttggtcgttgttcggcgttcgcgagggttcgtattgggcgtttttcgagtcggttcgcgatttttaaggtggtcgtcggggttcggtaggcgttttttttttcgtaaacgtttgttcgagcgcgcgtttcgtttcgagtgtttttagcgttcggttcgcggggcggcgcggcggcgggggttttacggggttttcggcggtcgaggcggcgtaggtcgtaggtttcgggtcggggggttttcgaaggtgtcgggtttcgggcggcgcgtttttttcgtcgcggtcgtcgcgcgtgtggaggaggcggagcggcgaggggggtttagtttatttaaggtcgcggtagtaagtgtcgttattcgcgtttttttcgtcgtttcgcgttttattcgcgggcgtttcgggtcgtttttttttttcgcgttcgatacgtcgtcgttattttgtttatttttttttttttttttgcgtcgtcgcggatatcgtacgttcggtcgtagggtacgttttttcgcgaggacgacgtgtttattcgttggttgaatttgttattttcggttttttgttcgtttcgtcgtcgttgacgattggagcgtttggattcggtcgggcgttcgagcggcgattggtcggcgtttggtttcgttcgaggggtggatatagcgcgtttattggttttcggagacgttcgttacgggtagggggcgggaagtaggtatggggagacgaggttacggttgtgatttcggtggggttcgggaagggggtcgtaggttacgggtgttaacggtttttttgaacggtcgtagggtgggttgagttcggtgggcgggaatttgggtttgcggatttggaaggagcggggttatttttattagagtttttttttcgtatttttttttggggcgaggttaagggttaaaaagtaatataaagtggttaattttagttaaaaattttttttttgagttatttttggattaggggaaagagaaacgtttagggcggtttttgttttatcggaatttatgggggaagttttaggatagcgttgggataagtttagcgggggtttttcgtgaaaaataagagttgttaaaatatggtttgataaggttgaaaatattgaatttttttgtgttagtttcgtgttttttatttttttttgtattagcgttaggttgtttagttggaataaattattttggtataattttcgttttttggttttaagcgatttttttgttttagtttttttagtagttgagattataggcgtgcgttattacgttcggttaatttttgtatttttagtagaaattataggtgtatgtttgtaattttagttatttagaaggttgagggaggagaatcgtttgaattcgggaggaggaggttgcggtgagtcgagatcgtgttattgtattttagtttgggtaataagagcgaaattttgttttaaaaaaaaaaaaaagattttttttagaaaattgaagttgaaggaatattttttaatttaaatttattttggtattttttttttgtattgattgttggtttatattttaattttttggaatttggagataatgttggataattggtatcggtaggttttacgtttttttagagaattgtaggatatatggaagtgatttaggaaatatttggtgattattatagatagaatttttgaagatggatttttcgtttaaagattattttttttaagaattttttttagttatttttttaagtgtttggacggagatgtgttgtgagtgtgaattatatacggaatttttttgtttttttgatacgtataattttattataaaatgttaaaaaatgtagtattttaaaaaacgtaagatgtattgttgatattaatttttataagtgtgttgtgttgttatatataataaattttttaaaaattattaaatatttagggatattaggtagggtgcggtggtttatatttgtaattttagtattttgggaggtcgaagtaggcggattacgaggttaggagtttgaaagtagtttggttaatatggtgaaattttatttttattaaaaatataaaaattagttgagcgtggtggtatgtgtttgtaattttagttatttaggaggttgaggtaggagaattgtttgaattaggattcgggaggcggaggttgcggtgagtcgagattacgttattgtattttagtttaggtaataagagcgaaattttgttttaaaaaaaagaaaagaaaagaaaagtattttttgtatagagaattttatgagttatacgaaaatttgtatagttttatattgaagttaatattgagttgtattagaatttatatttttagtaaaataagtttattgtataggtattattaaaggatagttatttattttttatttttattttttttttttttatttttattttttttttttttttttttttttttattttttggtttgtttttttttgagttttttttttttgttttatttttgtttttagtacgatatgtagtaatattttttttatattttttttgtagtttaattgttttttgtttatatggttgtttatttttggttgattgtttagattatattttatttagtttttttgtagtttttacgataaataggtttgggtgtttatttttgatttttgggcgatgtttagagtaaaataggaagaaggtagatggtggttttttaggagtattgcgattttttttttttttttttttatttttttttatatttcggaggaatgtaatttttaatttttttgttatagcgagttttgttattttttgttttttttttaaattttattttttttttgtagacgtggttttttatttttttaaatattttttggagaattttacgaaattgatagaagagttcgggtgtttttttttgtgttttttttggtaggtttgcgcgaagagggtatacgaggatattttgtttttcggtttgttggggtgttttttatttatggggatagaatagtatttatttggtgcgagtttttttttagagttttatagagtattcggatttaatagagatatttttttttatattgattttttttttttttttttgagacggagtttcgttttgttgttcgggttggagtgtaatggtatgattttggtttattgtaatttttgttttttagatttaagtaatttttttgttttagtttttggagtagttgggattataggtatatattattatggttggataatttttggatttttaatagagatagggttttattatattgtttaggttggtttcgaatttttaattttaggtgatttatttgtttcggttttttaaagttttgggattataggtatgaggtattatgtttgttttatatattgaatttttaaagttagaaaaattaaaaatgggtttgttaggtacggtagtttatatttgtaattttagtattttgggaggtcgaggcggatggattattcgaggttaggagtttgagattagtttggttaacgtggtaaaattttgtttttattaaaaatataaaaattagttaggcgtggtggcgggcgttcgtaattttagttatttgggaggttgaggtaggaggatcgtttgaatttaggaggtagaggttgtagggagttgagattttgttattgtattttattttgggtaataatgagatttcgtttcgaaagaaaaaaaaatgggtttggtatggcggtttttgtttgtaattttagtattttggggggttaaggtaggtgattatttgaggttaagagtttaagattagtttgggtaatatggtaaaattttcgtttttattaaaaatataaaaattagttaggtgtcgtggcgttcgtttgtaattttagttatttaggaggttgaggtaagagaatcgtttgaatttgggaggtagaggttgtagtgagttaagattgtgttattgtattgtagtttgggtaatatagtgagattcggttttaaaaaaaaaaaaaaagggtataaataaaatattttattggttagatatagtggtttacgtttgtaattttagtattttaggaggttaaggtgggttgattacgaggttaggagttcgagattattttggttaacgtggtgaaatttggtttttattaaaaatataaaaattagttgggcgtggtggcgggtatttgtaattttagttattcgggaggttgagataggagaaaggcgtgaatttaggaggcggagtttgtagtgaattaagatcgcgttatcgtattttagtttgggagatagagcgagatttcgttttaaaaaaataaataaataaaaataaaataaaatattttattaataattttaataatgattgtatgttgaaatgatgtaattttggatatgttaggttaaagtaaatgtattattaaaattaattattttagggttatgtatagtggtttatatttgtaattttagaattttgggaggattttttgagtttaggagtttgaggttagtttgggtaatatagtaagaatttgttttaaaaaaaaataaatatataaataataggttaggtgtagtggtttacgtttgtaattttagtattttgggagg

SEQ ID NO: 134 - DNA, 11029 bp, Artificial Sequence
  chemically treated genomic DNA (Homo sapiens)
tagagtgtgtgtgtgatgaataagtgtttgtgtgatgatgttttatttgtgtaattttttagttatggaagggtatagttttatgatgtttttagtgaaattttggtttatgaggatttttatatatatattttgttatggggattgtattgtttaaatatgtgagagtaaggttttggttatgtgttaataaaatagttaagttttttatggaagaaaaatggaagttttttgaaaggatttatatttttgtttgagtttgtggaagaggggtttgtagttggtaatgtgtatatatatgtgtatttgttattttgtggaaattataatcggttaaggggtgtaagattgatttatgtaggagagttgtagtattatggagtagaatgtggttatgaaatttggattttagttttttgtttattattaattagtgttggttagggtgtttttttaattgttagtgaagggattggattagataattttgaagatattttttttgagaattaagtaatttgttttaaggttgggtgcggtggtttacgtttgtaattttagtattttgggagggcgaggtaggtagattatttgacgttaggagtttaagattagtttggttaatatggtgaaattttatttttattaaaaatataaaaattgatggtcgtgtacggtggtttacgtttgtaattttagtattttgggaggtcgagataggtgaattatgaggttaggagttcgagattagtttggttagtatggtgaaatttcgtttttattgaaaatataaaaaataagttaggtatagtggtgggcgtttgtaattttagttatttaggaggttgaggtaggagaattttttgaatttaggaggtagaggttgtagtgagttaagatcgtgttatggtattttagtttgggcgatagagtgagatttttttttaaaaaagtaaaataaaaatataaaaattagttaggtgtggtggtacgcgtttgtagttttagttgtaggttgaggtagaagaatgatttgaatttgggaggcggaggttgtagtgagtcgggattgtattattgtattttagtttgggttatagagcgagattttgtttggaaaaaaaaaaaaaaaaaaaaaaaaaaaaaaaaaaaattttttttttaatttttaaaaaatttttaaaatttggattaaggtttttaattttggaaatttcggggattttggttaaaaagattttttaaggaattggggcggggaaaaaaaagtttttttaatttagggttaaaatattttgtgggggttttaaagtggggttttaaataggtggggaaaatttatggattgtttttttttggtttaattttttaattttttttagtttttcggaattttacgggtttttttttttaattttaataattttttaaaagggttttatgggtttaaatttttttttcgtttttggatttgaatttattttttttaggggaattttttattttttttttttttaaaatttttttggggggggtataattttttttgtatggtaaatcggtttcggggtttagttttcggaaagtttgttttttggaattaggttcgttttcggggtttttatgggggatttttaaatttggttttttgtaaatttgggggttaaggggtaaagtttttttggttttgaatttttattattttagggtcgagcgggtaggtatagtggtttatatttgtaattttagtattttgtggaggttaaagtgggaggattgtttaattttaggagttttagattagtttgggtaatatagtaaaatgttatttttatgaaaaatttaaaaaattaggttaggtgtggtggtttatatttgtaattttagtaatttgggaggttaaggtgggtagattatttgaggttagaagttcgagatttagtttggttagtatggtgaaaattcgtttttattaataatataaaaattagttaggtatggtggtgggtgtttgtaattttagttatttgggaagttgaggtaggagaatcgtttgaatttgggaggtggaggttgtagtgagtcgagatcgtgttattgtattttagtttgggtgacgagtgaaattttggtgtttttttattttaattttttttttgtatttttagttttttaggaggtaaaggtgggagaattgtttgagtttaggagtttgaggttgtagtaagttatgattgtattattgttttttaggttgggagaaagtaaaatattgtttttaaaaataaaaattaggttgggtacggtggtttacgtttgtaattttaatatttagggaggttaaggtgggcggattacgaggttaggagtttgaaattaatttggttaatatggtgaaatttcgtttttattaaaaatataaatattagttgggtaaaatgggggggttttttaattttaggtttttagggggtttaggttaaaaaatttttttaattttggagtttaaggttttttttggttaaatttgggttaagggtttttagtttgggggtaaaaagggaatttttttttaaaaaaggtaaattaaaattttaaaattatttcgggttggtggtttcgttttttagttttaattgtaggtttaggttaaaaaatgatttgaatttgggaagttaaggttttaataaatcgggattgtttttttgtatttaaatttgggttttaaaagggaatttgttttggaaaaaaaaaaaaaaaaaaaaaaaaaaaattttgttttaagtatcgaaaaagttgtgaaagttgtgattaagtttttatattttgagaattttgggattgttggttaatagtatttgttatgtagttgggttgggataaataaagtttatttaatttagtgttagatattttgtgtgggtatttaagatggtgttttaatatgttgtgtaatattaatgaatgtattatatatgattaaatatgttaatgttttttagttttttgaatatttattgttttttttttttatttttattaatttttgaaaaggttttaatggttttaattttattattagtattagaattagaatttattttttttatggatatatttatatttatttattttaataattttatgagggaggtagtagttttattgtatagtaaaataggtatagagattaagttatcgaaaagtatgatttttgtaattagagtagtttttcggattttattgttgtattttattatttgtatattagtaaatttggggtttataggttatagatttttttagttttgatatttttattattttatagtttttgaatttttttttttagtttgtttttattgtttagataatgttttaaatatatttttgtatttatttcgaagtaaaataaagtaatttttaattcgtttcgggttggaagttttttttttttatatatttggtagaaattatatagttgaaagtttgtttttttaaaaatttgtcgtaagatattggtaatttttatgaaggatgtgtgagggtacgaaaagtgtgaggggtggtagttatttttaagatattattttattaatattattattaggttatggtttttgtgttggtagtgtgttgatagtttagtgtgttggtagttttttatatttttgattgttttttattttgatgaaaattatagaaattattttattatagttgattagagtgatggttagtaattaattagttaattagtttagtagtgatattgttgtattttttaatttttttagaattatgatgttaatattatatataaataaaaggaaaataaaaatacgagattttttttttagagagtagtaagaggggttaggtatagtggttcgtatttgtaattttagtattttgagaggttgaggtgggtagattatttgaggtcggaagttcgagattagttttatcgatatggagaaattttatttttattaaaaatataaaattagtttggcgtgatggtgtatatttgtaattttagttatacgggaggttgagatagaagaattatttgaattcgggaggtggaggttgcggtgagttatgattacgttattgtattttagtttgggtaataagagtgaaaattttgttttaaaaaaaaaaaaaaaaaaagtaagagggtaaggtaggaagtaatattttatatgtgaaagtgtattttagtgtaacgtataggagttttgataaaagatgtgtagaattatagttttattatgagttattttttgtatttataagtagaaagttgattattttttttaagttaaaaaaataatgttgggggagatggtgtttgtgtgagtgaatagaaatttagacggtttaaatgttttaaggtttgatatttttttttaatttttttaagaaattaattggtttgaaaaaagttattttgtaaaagagggaaaaaaagttggattttttagttgttgagaaggtatgtttacgtaatatgagtttaaagtgaatagttatttttgtacggattattatatattttcgttttggagggaaaaaagtttgttagagaatgtaaaatggcgatttttagtgacgttatatttgtttcggtcgcgttttggggtgtttgtaagggcggaagcgggttatagtcgttttattgtgggcggtcgtggttattatgtaaaaggaaaagttttagtgtcgggcggatgtgtatcggcggtaatatagtaagggcggaagtttttttttaagggcggaagttttttttttaagggcggaagttttttttttaagggcggaaaggttttagtcgtaaaatggtttcggtttttgtcgcgttatagttattttcggggcggatcggaagttgttttgttttgtttcgagatggttgcggggatgtatttggaatattatttggatagtaagagtaggttggaggtgggggtcggggttgtagagtggtgcggggattagggatgagaggatttgtagtttttaagttttagtgacgagaaggttataattatgaagcggttttgtggtaggaaatattggagggtgcggagaaagagggggcggggtagtaggatcgaggtttcgttgatgggtgtagacgagggaggggtgcggtgtgggggttagagacgtgttttgaagggttagtgtgtatggttaggaagatagttgttgtttttattttttagggtttttagtttcggtagatttttttttttatagtcgtttagaatcgttattatatattgttatttggagtagcggtaaagattttttttttattttatttttttttaaaagtggttttttatggggttgagagtggtggtgatgagtgattattgttagatgatgaattagaacgtttttttttatggagtaaagatttaatttttattaaatgaaaatttggtgtttatgcgatttatgtaaattatttttgtagaaagtttattgttttgtgcgtttatatttgttttagggttcggagttatttatttaataaatatttattgaggttttgttatgggttagatataatggtaggtattagggatagaaaaatgagtaagataaggtttttgtttttaagaagtttacgatttagtaggaaatagattttgtaaataattataaaatattgtgataagtgagataatggaaatatattaaaaaggatatttggtaggtaattttggagaaaaggggggtaattatttggggatgtaggaaaagttttatagcggaggtgatgtttgaatagggttttgaaggttatttgttagtgaggagagaaaaaaggaattttaggttggggaaagtattcgtaaaggtattgtgatgggtttgtggtaaggttaagggtgtttgatatttatgatttagaggttagcgtatttgatatttatgaatttaaggtaagaaattgagaaaggagattggagaaagaggttgaggttagattggataaggttttttaagttaaacgaagaagtttgtattttaaagtagagtatgatttttatagaggaaaatgattaatatatggtaaattggagtatgatattgttgataatagagattaattagtgataatattttaggatagagataagaatttgattttagggagttatagaagtatttaggagttaaatatgaaaggattgattgaatgattgagtggttgagagagaaggaagaatttaaggtggtttttttttgtttagaaagtgaggtagataggttgggtatagtagtttatgtttgtaattttagtattttgggaggttaaggcgggtagattatttgaggttaggagtttgagattattttgtttaatatggtgaagtttagtttttattttaaaaaaaaaaaaaaattagttgggtatggtggtatgtgattgtaattttagttatttgggaggttgagttaggagaattatttgaatttagtaggtgaagattgtagtgagttaagattatatatattattgtattttagtttgggtgatagagaaagatttcgtgttttttttaaaaaaaaaaaaaaaaaaaaaaaaaataaaggttggtggttaggtacggtggtttatgtttgtaattttaatattttgggaggttgaggtaggcggattatgaggttaggagatcgagattagtttggttaatatggtgaaatttcgtttttattaaaaataaaaaaaatagttaggtgtggtggtgtgtttttgtagttttagttatttaggaggttaaggtaggagaatcgtttgaatttgggaggtggaggttgtagtgggtcgagattatgttattgtattttagtttgggtaatagagtgagatttcgttttaaaaaaaaaaataaaaataaaaaggttgggagcggtgtttacgtttataattttagtatattgggaggttgagatgggtggatcgttttaggttaggagttttaagattagtttggttaatatagtgaaatttcgtttttattaaaaatataaaaattagttgggcgtggtggtagacgtttgtaattttagttatttgggaggttgaggtataagaattttttgaatttgagattgcgttattgtattttagtttgggcgataagagcgatattatattttaaaagaaaagaaaagaaagttatttagcggagaaaagattatgttaattgttgtagagatattttttaggataggtttaataatattattagatttggtaaattattagtgatttagttttgtgaattggtggtagtagatttgaagttgtaggtttaaatagtagaggtattttatttttttttatttattttattttagtttttttgtttgtttgtttgtttttgagatagagttttattttgttatttaggttggagcgtaatggtgtaattttggtttattgtaatttttgtttttcgggtttaagtgatttttttgttttagttttttgagtagttaggattatagtgttcgttattatatttagttaatttttgtatttttagtagagatgaggttttattgtgttggttaggttggttttaaatttttaattttaggtgatttatttattttggttttttagagtgttgggattataggtatgagttatcgtattaggttttttattttttatatatatatttaatttttatagagataggatttggttatattgtttaggttggttttagatttttgagattaagcgatttatttgttttggttttttagaatgttgggattataggcgtgagttattgtgtttagtaagtagaggtatttttaaagttttaggtggagttttggtaagagattttttttgtattggggtgataaatatttatgtatttatttaagtatttattgagtatttgttttttgtaagttataattttaaatattatggaaataggagagaatatgatagttatgttcggtttggggagatagatattaaataattaattatatattattttttttaatttttttgttttttgaaatagttttgtttttttgttcgggttgtaatttttatttttttggtttaagtaattgttttgttttagttttttgagtaattggaattatagttataggttattatgtttatttattttttttttttttttttttgagatagagtttcgttttgtcgtttaggttggagtgtagtggagcgatttcggtttattgaaagttttattttttggatgtacgttatttttttgttttagtttttcgagtagttgggattataggtattcgttattacggttagttaatttttttgtatttttagtagagacggggttttattatgttagttaggatggttttaattttttgatttcgtaatttgtttttttcggttatttaaagtgtcgggattataggtgtgagttatcgcgtttggtttaatttttgttttgttttgtttttgagatggagtcgtattttgttatttaggttgaagtgtagtggtgcgattttagtttattgtaatttttatttttcggatttaagtaatttttgtgttttagttttttaagtatttgggattataggttttattatgttggttaggttggttttgaatttttggttttaagtgagttattcgtttcggttttttaaagtgttagaattataggcgtgagttatcgtgtttggttttaatttttgtatttttagtagagatggggttttgttaggttgttaaggttggttttgaatttttggttttgagtgatttatttgttttttagaatgttggattataggtatgggttatcgtatttagttaattaattatatatttatttaattatagttggataagtgttttaaaaaggtggttagaatattttgatatagatcgagggtagttaatagagtttgggaaagttgagtttgagttgaattttggaagaacgaataggaatttaataggttaagagggatggggtggatgggatgaggaaaaacgagcggtgtattttaattagagagaatagtatgtggaaagttaaatggtaggaggagtataggttagtttgaggtagtgcgaggaggttagtatgggtaaagtagagtataaagggagattgatatgagtttaggttggtgtgaggtaagtaagggttagaaagcgtagaatatttttagagtagtaggaagtgattagaaggttataagcgggagagtgatttgattaggtttgtattttttatttttgtgtttgtttttgtttttgtttttttgagttagtgttttgttttgttatttaggttggagtgtattggcgtgatttcggtttattgaaatgtttattttttaggtttaagggatttttgtgttttagttttttaagtagttgggattataggtatgtgtattaagtttggttaagtttttgtatttttggtagagatagagttttattatgttgtttaggttggttttgaattttttagtttagttgatgcgtttatttgggttttttaaagtgttgggattataggtatgagttatcgtgtttggttaggtttgtattttttaaaaaggatattttggttattatatggaagtagattggaagtgttatgtgtataatagaggatattaggagattatttgtaatttgaggataaagagtttggaggtagagatggaaaataaaagaaaggggttcgttttagtggtttatgttagtaattttagtattttgggatattaaggcgggcggattatttgaggttaggtgatgaacgtaggagtatgtttattaaggtaaagaaagggaagagtttttttttttttttttggagatagagtttcgttttgttattaggttggagtgtagtagtgtagttttggtttattgtaatttttgttttttaggtttaagtgatttttttgttttagttttttgaatagttgggattataggtacgtgttattatatttggttaatttttatatttttagtagaaataggtttttattatgttggttaggttggtttcgaatttttgatttcgtgatttattcgttttaattttttaaagtgttgggattataggtttgagttattatatttgacgggaagagtttatttataaaggaaggttattgaaggcgaaaagggtgggatagttatgtagaaatggaaaggttttgtagagaaagagttaagtatggtttgttatgagagaattgatttattttgttatagataaatttagaggtttagaggaaggaaaattgagttgtattttattttttgtttgtttgtttgtttgtttgagatggagttttattgtgtcgtttaggttggagtgtagtggtgcgatttcggtttattgtaaatttcgttttttaggtttatgttatttttttgttttagttttttgagtagttgggagtataggcgttcgttatcgtatttggttaattttttgtatttttagtagagacggggttttattatgttagttaggatggttttaattttttgatttcgtgatttgtttttttcggttttttaaagtgttgggattataggtgtgagttattatgtttggttatttgtttgtttttgagatagggatttgttttattgtttaggttggagtgtagtggtttaattacggtttattgtaatttttgttttttggatttaagtgatttttatgttttagttttttaagtagttgggattagagatgtttatcgttatattaggttaatttttatatttttaatagagatggaggtttcgttatgttggttaggttggttttgaatttttggttttgagtgatttatttttttggttttttaaagtgttgggattgtaggcgtgagttattatgttcggtttgaattgtattttaaaaggagttgtaaggtttatgtatagttagttttgtgattgttttttttttttttt

SEQ ID NO: 135 - DNA, 11029 bp, Artificial Sequence
  chemically treated genomic DNA (Homo sapiens)
gggaagagagagaaataattataggattgattatgtataggttttatagttttttttaaagtgtagtttaggtcggatatggtggtttacgtttgtaattttagtattttgggaggttaagggggtggattatttaaggttaggagtttaagattagtttggttaatatggcgagatttttatttttattaaaaatatgaaaattagtttagtgtgacggtgggtatttttaattttagttatttgggaggttgaggtatgagaattatttgaatttaggaggtagaggttgtagtgagtcgtgattgagttattgtattttagtttgggtaatagagtaagtttttgttttaaaaataaataaatggttaggtatggtggtttatatttgtaattttagtattttgggaggtcgaggagagtagattacgaggttaggagattgagattattttggttaatatggtgaaatttcgtttttattaaaaatataaaaaattagttaggtgcgatggcgggcgtttgtatttttagttatttaggaggttgaggtaggagaatggtatgaatttgggaggcggagtttgtagtgagtcgagatcgtattattgtattttagtttgggcgatatagtgagattttattttaaataaataaataaataaataaaaaataaagtgtagtttagtttttttttttttgaatttttggatttatttgtgataggatggattagtttttttatgataggttatgtttaattttttttttataaaatttttttatttttgtatggttattttatttttttcgtttttagtgatttttttttataaataagtttttttcgttaggtgtggtggtttaagtttgtaattttagtattttgggaggttgaggcgggtggattacgaggttaggagttcgagattagtttggttaatatggtgaaagtttgtttttattaaaaatataaaaattagttaggtgtggtggtacgtatttgtaattttagttatttaggaggttgaggtaggagaattatttgaatttgggaggtagaggttgtagtgagttaagattgtattattgtattttagtttggtgatagagcgagattttgtttttaaaaaaaaaaaaaaaagtttttttttttttttattttgatgaatatatttttacgtttattatttggttttaggtgattcgttcgttttgatattttaaagtgttgggattattggtatgagttattaagacgggttttttttttttattttttatttttgtttttaagttttttgtttttaaattataaatagttttttggtattttttattatatatataatatttttaatttatttttatatagtagttagaatgttttttttaaaaaatgtaaatttggttaggtacggtggtttatgtttgtaattttagtattttgggaggtttaggtgggcgtattagttgagttgaggagtttaagattagtttgggtaatatggtgaaattttgtttttattaaaaatataaaaatttagttaggtttggtgtatatgtttgtaattttagttatttgggaggttggggtataaaaattttttgaatttgggaggtggatattttagtgagtcgagattacgttaatgtattttagtttggatgatagagtaagatattgatttaaaaaaataaaaataaaaataaatataaaaataaaaaatgtaaatttaattaagttattttttcgtttataattttttggttattttttattgttttgaagatgttttgcgttttttggtttttgtttattttatattagtttgaatttatgttagtttttttttgtgttttgttttgtttatattggttttttcgtattgttttaaattggtttgtgttttttttgttatttggttttttatatgttgttttttttagttggaatgtatcgttcgtttttttttattttatttattttattttttttggtttattaaatttttgttcgtttttttaaagtttagtttaaatttaatttttttagattttgttaattgttttcgatttatgttaaggtattttagttatttttttaaagtatttatttaattgtaattaaataaatgtgtaattagttggttgggtgcggtggtttatgtttgtaatttagtattttggaaggtaggtggattatttaaggttaggagtttaagattagttttggtagtttggtaaaattttatttttattaaaaatataaaaattagggttaggtacggtggtttacgtttgtaattttagtattttgggaggtcgaggcgggtggtttatttgaagttaggagtttaagattagtttggttaatatggtgaaatttgtaattttagatatttgggaggttgaggtataagaattgtttaaattcgggaggtggaggttgtagtgagttgagatcgtattattgtattttagtttgggtgatagagtgcgattttattttaaaaataaaataaaataaaaattaggttaggcgcggtggtttatatttgtaatttcggtattttgggtggtcgaggagagtagattacgaggttaggagattgagattattttggttaatatggtgaaatttcgtttttattaaaaatataaaaaaattagttggtcgtggtggcgggtgtttgtagttttagttattcgggaggttgaggtaggagagtggcgtgtatttaggaggtggagtttttagtgagtcgagatcgttttattgtattttagtttgggcgatagagcgagattttgttttaaaaaaaaaaaaaaaaaaaatagatgggtatggtggtttgtggttgtagttttagttatttaagagattgaggtaggataattgtttgaattagggaggtagaggttgtagttcgggtaaaagagtaagattgttttaaaaaataaaaaaattaaaaaaaataatgtgtaattagttatttggtatttgtttttttaggtcgaatatggttattatatttttttttgtttttatagtgtttagaattatgatttgtaaagagtaggtatttagtaaatatttgaataaatgtatgaatatttgttattttagtataagagaaattttttgttaaggttttatttaaaattttaaaaatgtttttatttgttgggtatagtggtttacgtttgtaattttagtattttgggaggttaaggtaggtagatcgtttgattttaggagtttgagattagtttgggtaatatggttagattttgtttttataaaaattaaatatatatataaaaaataaaaggtttggtacggtggtttatgtttgtaattttagtattttgggaggttaaggtgggtggattatttgaggttgggagtttgagattagtttggttaatatagtgaaattttatttttattaaaaatataaaaattagttgggtatggtggcgggtattgtaattttagttatttaagaggttgaggtaggagaattatttgaattcgggaggtagaggttgtagtgggttaagattgtattattgcgttttagtttgggtgatagagtgagattttgttttaaaaataaataaataaatagaaaaattaaaataaaataaataaaaaaaaataaaatgtttttattgtttaaatttataattttaggtttgttattattagtttataagattgagttattggtgatttattaaatttaatggtgttattaagtttattttaaaaaatatttttgtagtagttggtatgatttttttttcgttgagtaatttttttttttttttttttgaggtgtagtgtcgtttttgtcgtttaggttggagtgtaatggcgtaattttaggtttaaggaatttttgtgttttagttttttaagtagttgggattataggcgtttgttattacgtttagttaatttttgtatttttagtagagacggggttttattatgttagttaggttggttttggaatttttgatttaaggcgatttatttattttagttttttaatgtgttaggattataggcgtgagtatcgtttttagtttttttgtttttgtttttttttttgaggcggagttttattttgttgtttaggttggagtgtagtggtatgatttcggtttattgtaatttttattttttaggtttaagcgatttttttgttttagttttttaagtagttgggattataggggtatattattatatttggttattttttttatttttagtagagacggggttttattatgttagttaggttggtttcgattttttgattttatgattcgtttgttttagttttttaaagtgttgggattataggtatgagttatcgtgtttggttattagtttttgttttttttttttttttttttttttttgagagggatacggagtttttttttgttatttaggttggagtgtagtggtatgtatgattttagtttattgtaatttttatttgttgggtttaagtgatttttttgatttagttttttaagtagttgggattatagttatatgttattatgtttagttaatttttttttttttttaaagtagagattgggttttattatgttggatagggtgattttaaatttttgattttaagtgatttgttcgttttggttttttaaagtgttgagattataggtatgagttattgtgtttagtttgtttattttattttttaagtaggaagaagttattttagattttttttttttttttaattatttagttatttagttagtttttttatatttaatttttaaatatttttgtaattttttaaaattaggtttttatttttgttttggaatgttattattaattgatttttgttattaataatattatgttttaatttattatatattagttatttttttttataaaaattatattttattttaaaatgtaaattttttcgtttggtttaaaagattttgtttaatttagttttagtttttttttttagtttttttttttaattttttattttagatttataaatattaaatacgttgatttttgagttataaatattaaatatttttgattttgttataaatttattatagtatttttgcggatgttttttttaatttggaattttttttttttttttttattggtaaataatttttaagattttatttaaatattattttcgttgtaaagttttttttatatttttaggtaattattttttttttttttagggttgtttattaagtgttttttttaatgtatttttattattttatttgttatagtgttttataattatttgtagaatttgttttttattagatcgtgagttttttgagggtaggagttttgttttatttatttttttatttttagtgtttgttattatgtttgatttatagtaggattttaataaatatttgttgaataaatgatttcgggttttaaaataaatgtaagcgtatagagtaataggttttttgtaggggtggtttatataaatcgtataaatattagatttttatttgatgggaattagatttttattttatgaagagaagcgttttagtttattatttgatagtggttatttattattattatttttaattttatgagaagttatttttgaggaagaatggagtggaggagaggtttttatcgttgttttaaatggtagtgtgtgataacgattttgaacgattatggggaaaaaaatttatcgaggttggagattttggagaatgggggtagtaattatttttttggttatgtatattagttttttaagatacgtttttaatttttatatcgtatttttttttcgtttatatttattagcggggtttcgattttgttgtttcgtttttttttttttcgtattttttaatattttttgttatagaatcgttttataattgtgattttttcgttattggaatttaagggttatagatttttttatttttgattttcgtattattttgtagtttcgatttttatttttagtttgtttttattgtttagataatgttttaaatatattttcgtagttatttcgaagtaaaataaagtaattttcgattcgtttcggaagtgattgtaacgcgataggggtcgaagttattttgcggttaaagttttttcgtttttaaaaggagaattttcgtttttaaaaggagaattttcgtttttaaaggagaattttcgtttttattatattatcgtcggtatatattcgttcgatattgaaatttttttttttgtatggtagttacgatcgtttatagtgaggcggttgtagttcgttttcgtttttatagatattttaggacgcgatcgagataggtatgacgttattggaggtcgttattttgtattttttagtaaatttttttttttttaaaacgggaatgtatggtaattcgtgtaggggtaattgtttattttaggtttatattgcgtaaatatatttttttagtaattggaagatttaatttttttttttttttttgtagaatgattttttttaagttagttagttttttaaggaagttggggaagagtattaggttttgagatatttaaatcgtttgaatttttatttatttatataaatattattttttttagtattatttttttaatttgagaaagatgattaattttttatttataaatataaagaatgatttataataaaattataattttgtatattttttgttagagtttttgtacgttatattagaatatatttttatatataaaatattattttttgttttgtttttttgttttttttttttttttttttgagatagaatttttatttttattgtttaggttggagtgtaatggcgtgattatggtttatcgtaatttttatttttcgggtttaagtgatttttttgttttagtttttcgtgtagttgggattataggtatgtattattacgttagattaattttgtatttttagtagagatggggtttttttatgtcggtgaggttggtttcgaattttcgattttaggtgatttgtttattttagttttttaaagtgttgggattataggtgcgaattattgtgtttggttttttttgttattttttaagggggaaatttcgtgtttttgttttttttttgtttatatgtgatgttagtattataattttgaagggattgagggatgtagtagtattattattgggttagttggttagttagttgttagttattattttagttagttatggtagagtgatttttatggtttttattagaatgggaagtagttaagggtatgagaggttgttaatatattaggttgttaatatattgttaatataaaggttataatttaatagtggtgttagtaagatagtattttagagatagttgttattttttatatttttcgtatttttatatattttttataagaattattaatgttttacggtaagtttttaaagagatagatttttagttatataatttttattaaatatgtggagaagaggaatttttaattcggggcggattggaagttgttttgttttgtttcgagatggatgtagggatgtatttgaaatattatttggatagtaagagtaggttggaggagggggtttaggggttgtagagtggtgggggtattagagttgaaaggatttgtagtttgtaaattttaggtttattagtgtgtaggtagtaagatatagtaatagaattcgggaaattgttttaattataaaagttatgtttttcggtaatttgatttttgtgtttgttttattatataatgagattattattttttttatagggttgttggaataagtgagtgtgagtgtatttataaaaagagtagattttagttttaatattggtgatgaagttagggttattagggtttttttaagagttggtgagagtgggaggaaaaagtagtaaatatttagggagttaagaaatattggtatatttggttatatgtgatatatttattggtattatataatatattgagatattattttaggtgtttatataggatatttagtattaaattaagtgggttttatttattttagtttaattatataataagtattattggttagtagttttagagtttttaggatgtgggagtttggttataatttttataattttttcggtgtttaaagtaaggttttttttttttttttttttttttttttttaaaataaatttttttttggggtttaggtttgagtgtaggggggtaatttcggtttattggaattttggttttttaggtttaagttattttttggtttaaatttgtagttgggattaaggggcggggttattaattcggggtaattttgggattttaatttattttttttgaaaaaaagttttttttttgtttttaggttggaagtttttggtttaaatttggttaaggggaattttgggttttaaggttaaaaaaattttttggtttaaattttttgaaaatttggaattggggggtttttttattttgtttagttaatatttgtatttttagtagagacggggttttattatgttggttaggttggttttaaatttttgatttcgtaattcgtttattttggtttttttaagtgttgggattataggcgtgaattatcgtgtttagtttaatttttatttttggagatagtgttttgtttttttttagtttggagggtagtggtgtaattatagtttattgtagttttaaatttttgagtttaagtaatttttttatttttgttttttgagaagttgggaatataaaaaaaaaattaaaataaaaaaatattagagttttattcgttatttaggttggagtgtaatggtacgatttcggtttattgtaatttttattttttaggtttaagcgatttttttgttttagttttttaaatagttagaattataggtatttattattatatttggttaatttttgtattgttagtagagacgggtttttattatattggttaggttaagtttcgaatttttgattttaggtgatttatttattttggttttttaaattgttgggattataggtgtgagttattatatttggtttaattttttaaattttttatagagatgatattttattatgttgtttagattggtttgaaatttttgaagttaagtaatttttttattttggtttttataaagtgttgggattataagtgtgagttattgtgtttgttcgttcggttttaaaatggtggggatttaaagttaaagagattttattttttaatttttaggtttataaggggttaggtttaaaagttttttatagaaatttcgaaaacgggtttaattttaaaaggtaagtttttcggaaattggatttcggggtcggtttattatataaaggggattatattttttttaaaagggttttgggaaaaaggagggtgaggggtttttttaaaaggggtggatttaagtttaaaaacggggaagaaatttaggtttatagggtttttttaaaaaattgttaaaattggggggaaaaattcgtaaaatttcggggggttaaaaaaaattggaaaattgggttaaaggggaataatttatgggttttttttatttatttgggattttattttggggtttttatagggtattttggttttaaattaagggggttttttttttttcgttttaattttttaaaaggtttttttggttaaaattttcgaggtttttaggattggggattttggtttaaattttaaaaattttttgggggttaaaagaaaggttttttttttttttttttttttttttttttttttttttagatagaatttcgttttgtggtttaggttggagtgtagtggtgtaatttcggtttattgtaattttcgttttttaggtttaagttatttttttgttttagtttgtagttgggattataggcgcgtgttattatatttggttaatttttgtatttttattttatttttttgagagagagttttattttgtcgtttaggttggagtgttatggtacgattttggtttattgtaatttttgttttttaggtttaaaagatttttttgttttagttttttgagtagttgggattgtaggcgtttattattatgtttagtttattttttgtatttttagtagagacggggttttattatattggttaggttggtttcgagtttttaattttatgatttatttgtttcggttttttaaagtgttgggattataggcgtgagttatcgtgtacggttattaatttttgtatttttagtagagatggggttttattatgttggttaggttggttttgaatttttgacgttaagtagtttgtttgtttcgtttttttaaaatgttgggattataggcgtgagttatcgtatttagttttaaagtaagttatttaatttttaaaaaaggtatttttagagttatttagtttaatttttttattaatagttgaagaagtattttggttaatattggttgatggtaggtaaagggttgaagtttaggttttatgattatattttattttatagtattatagtttttttgtataaattaattttgtattttttaatcggttatgatttttataaggtaataaatatatatatgtatatatattgttaattgtaagttttttttttatagatttaggtaggagtgtaggtttttttaagaggtttttattttttttttatagggagtttagttgttttgttaatatataattaaagttttgtttttatatatttaggtaatgtaatttttatgatagaatgtgtatgtagaagtttttataaattaggattttattggagatattatgaaattgtatttttttatgattggagaattgtataaatggggtattattatataagtatttgtttattatatatatattttg

SEQ ID NO: 136 - DNA, 1157 bp, Artificial Sequence
  chemically treated genomic DNA (Homo sapiens)
ggattttgttttttttgaaggttttagggaagagtgttttttgtttttttcgaaggttttagggaagggtttgtttttttaggtttttggtggtttgtaggtgtagttttttaatttttttttttaagcggtttgttgtttataaggatacgagttatattggatgaggggtttattaattgatggtttttgtaaagtttttatttttaaataaggttatattgtgaggtattgggagttaggattttaatatagtttttttggtggatataatttaatttttaataacgtttatataattttaagtagggtttggtattttgtgtgttttttggagagcggttgagttaggttttggtagtgtttaggttatcggtgattgtagtttttggacggtatcgtttattataggttttggaggttgtttttacggttttttgatagggtttttgttggtttgggggtttttgattaggggagcggttttaggaggggagagattcgcgtttcgggtttagcgtagtcgtttcgagtaggatcgggatttttattaagcgggcgtcgttttacgattttcgcgcgtttttaggattattcgggtacgtggtaggtcgtttgtacgttcgcggattatttttgtgataggaaaaggtacgggttatttggtaaattaaggtatagagttttaggcggaagttgggaaggcgtcgttcggtttgtatcggtcgaagggttattcgggttaggcgtatagggtagcggcgttgtcggaggattagggtcggcgtgtcggcgtttagcgaggatgcgtagattgttttaggttcggcgtcgtcgtattgggtatgcgtcgattcggtcgggcgggaatatttcgtttcgttcgggtttcgttttagtttcgttttcgcgcgtttcggtttcgttttcgcgcgtttttttgttttttttaggttttcggtttcgtttcgttttagatttcgttttacgtcgttattttcgtgtttttcggtttcgttttcgcgtttcggatatgttgggatagttcgcgtttttagaacgttttgcgtttcgacgttcgtaggttttcgcggtgcgtatcgtttgcgatttggtgagtgtttgggtcgtttcgttttcggaagagtgcggagttt

SEQ ID NO: 137 - DNA, 1157 bp, Artificial Sequence
  chemically treated genomic DNA (Homo sapiens)
gagtttcgtattttttcgggagcgaggcgatttagatatttattaagtcgtaaacggtgcgtatcgcgaggatttgcgggcgtcgggacgtaaagcgttttaggggcgcgggttgttttagtatattcggggcgcgggggcggggtcgaggggtacggggatggcggcgtggggcggggtttagagcggggcggagtcgaggatttgagaaaagtaagagagcgcgcgggggcggggtcggggcgcgcgggggcggagttggggcggagttcgggcggggcggggtgttttcgttcgatcgggtcggcgtatgtttagtgcggcggcgtcgggtttgaggtagtttgcgtattttcgttggacgtcggtacgtcggttttggtttttcggtagcgtcgttgttttgtgcgtttgattcggatggtttttcggtcggtataagtcgggcggcgtttttttagttttcgtttgaggttttgtgttttagtttgttaaatggttcgtatttttttttgttatagggatagttcgcgggcgtgtaagcgatttgttacgtgttcgagtggttttgaaagcgcgcgggggtcgtaggacggcgttcgtttagtgagaatttcggttttgttcggggcggttacgttgagttcggagcgcgagtttttttttttttggggtcgtttttttagttagggatttttagattagtagagattttgttagggggtcgtgggggtagtttttagggtttgtggtgggcgatgtcgtttaggggttgtagttatcgatggtttagatattgttagagtttgatttagtcgttttttagagagtatatagggtgttaggttttgtttggggttgtgtggacgttattaggagttgaattgtgtttattagagaagttatgttggagttttaatttttagtattttataatgtgattttatttggagatggggattttatagaagttattaattagtgggttttttatttagtatgattcgtgtttttataggtagtaggtcgtttggggaggaggattggagggttgtatttgtaagttattagaagtttaagaggatagatttttttttggagttttcggagggagtagaggatatttttttttggagtttttagagggagtaggattt

SEQ ID NO: 138 - DNA, 8093 bp, Artificial Sequence
  chemically treated genomic DNA (Homo sapiens)
ttatggaaggaaatgagattagttagcgagttgatatagaataaggtagtttaaaataaatttttttaaaaatacgaagaatagatattgaagggaagaggtgtttgtaaagattaagaaagtatatttggagatggtatttttttaaagttaaagttattaagtgtttaagtgttttaaggagggtaagattattaataaggatttagtatagtagagtaatttgagtggtaatacgggatattgggaatataaatttgttaagaaaattagtaggaatgagttataggatagtaattggtaaggatttaataattttttttttaatgtacgtattttaattatatttattgttataataggattagtaataattatatttatttaaaaaaaaaaagattgttatgtagttatagaattatttaatatagaaaatagtaaaatatatttttttttttttttttttttttttttttttttataaataagattagtttatagtaaattttttatagttaagggttaatttaaaatttttggtttatattttttttttatttaatgattatatgatgtaaattaattttattaatattttaagtaaaatatattggaattttataaaatgtataagattttaatatttaaggaattggggttagaaagtagaagtggtttttaggttttttagttttttttttaagtaataaagttttgttgtgaatatttaaagttattgggaaattatcggtagatttttttgtttttttttttcggttttttattatgttgtttttttagatatgtaagtttattttattaattaaaattttagtttgattatttttgataagtatttaatcgatatgtaattttttttttgttttaaatatgtataataggatagagtttttaaatttgatttaattattaatttttgatttataagtgttatggtgagttaatagaatttattaatgtttttattgtattttattagttaaatttagaaggttggaattagttttttttatttagtattttgttagtttgtttagtttgtatttttaattttgtttttaatggtaatttgttttattttttgaaataaaataatttatattttgggagggttaattttttattgtgttaggttgttttatgtattgtaggggtgagtgtttttaggtttaaatgttaatagaagtttttagtaaatatgataattaaaaaagtgtttttatatattttttagtattttttggaatgataggttattgtttttagttgaaagttattggtataattttggtttttaagtttttatgttatttattttaattgtttagatattaattttatttaaatttttagttatagtttggttttttgaatttgttggattagtaattatagattaaggtgttttaatagttaagataggattttggaataagagtttttaaattgtataatatttgagaggatttatgaatataaattgggttttgtttataattagttttatataatgaattttaagattgtttttttatggtgaatagaagtttggaaattattgttttggtataaagtagattattttagtagaaatatagaattattgtaatttgtgaataagattgtttttaaatatttttatttgtgtgttattttatatatagaatgtgtacgatagttttaaattttagaataaatttatttttagtatttaataaaatttgatattgtattattttaaaataaagtgtttattttaggtaggattttttaaaataaagtagtaatatttacgtagataagataaaaaagttaaaatattttatattttttaattttggagtgtaattttttttttttatcgtttttgatagggttaaatttgtgtttatagtaaaaaaaaaaaaaaaaagaattattaattggtaattattaagattttatatttattatagttttttaataggtaagttgataaaatagtttttagttattaaaaaaaaaatttaaggaaaatttttaataattagttttatttttaaattgtatgaagttttttatatttgaaatttaaaaatgattttaatgattttttttattagtaatgtgttattattgaggtgggtgatggggagggaagagggaagaaatttgttagtattattttcgaatttagaaatgtttaaaaaaaagttttaaatattttgatggttagataaaatatttttattgttatgtatgggttttttttttggaaatttatgaatttgttatgtgagtttttgtaaattggtttaaaagtatatttaaggagttgataatttaagattatatgaattagaattttaatattttattaaaataagagttgaaatttttggtatttatttttagaatatttaaaaaatagattgtaaatttaatttatattaatattaaatttttttaaaattaattatattataaaagataatgattttgttattaaattaagttttaaaaaaggtggtatttttatgttttagttttatgttgttatttgagatgaaaaaaaaggtaattgttagaattttaattgtgattagtttggacggttggtatttggtatttttttataatttaaattagtaaatttgaaaatttaaattaatttttgtttttagaattaaatttttgttgagttttttaattttgtattataaagttttatggattagatttattttttttttttataaggttattttaatcgggttttattttagttgtggtaattcgaaatagggtttggagatgtttatttgttaatggttgatttaaagtgtgttggtttcgagttaaatatgaaaaagtttttttatagatttggttattattaaataaggatgttattttataggtaatttttttgataattgggtaggatttagtagataatttagtataaaattgttttaagtttttgattttgtatttattttaaagattagtgtttgtttgaagttttgttagttttatttttattgaaataggtgtatatttaggtttaaagttaaatggatttgaaaaaagttttaagttttttttaatgaatttgaggtttttaaaatgttttttaaattttttttggagacgatagattattatttgatatttattaggattaaatatttttttattttttttattttgttgttttagtttattaataatttttttgagggtaggaaagtttgttagatttttttttttaatatgtttttgaaataaatttagtttaatttcgaaagtataaatatggttaaaggtagtagtagtaaagattttattaattcgtaattttttattgagttttcgaaggtgttttataatgtttattaagaagttaaagttataaagttattgtttgtttgagaagtggattgttgttgtttttattgaaattaagaacgtttttatttttttttttagagagaatattagttttaaagtttttttttttttaagttaattgtttagatatcgtttattaatttttttattatgttttgatttagatttcgttagtaaagtttgaaatttaggtcgtttaacgtttttggttttaattaaaattatttattcggatatggtatttatgatttgattaatatttatattataggagtttaatagttttaagtgaagaaattttgaataatgaatgatattttaatagttggggtttacggtttttttttttatgtatgagacgagttttgagtttttattaattatttttaaagtatgggtcgtggttagtttaattattttttgtaagttaagttttgttgtttgtagggattttaggattgtcgatatgagcgtattaatattgaaatgatgagttaggttgattatggttagaagatttttttgtatttttaatttagggtttatatcgcggataaagattaggaggtagtttttataggttataaaagtttggtcgtttaaggtaagagaataggttttaaagtttttggttcggttaaaaagttggttgcgtagatttttgttaatgtttaggattttttgttttgtgatatttggagataagttaacgttttgtaggacgtttatatgttcgggtagtattttttttagtaatatttttatgtattggtatataaagttttttttattttagtcgcgattttttaaggttaagaggcggtagagttcgaggtttgtacgagtagttttttttttaggagtgaaggaggttacgggtaagtcgttttgacgtagacgttttattagggtcgcgcgttcgtcgttcgttatatatcgttcgtagtattcgtgtttagtttcgtagtggcgtttgacgtcgcgttcgcgggtagttacgatgaggcggcgatagattaggtatagggttttatcgtttttcggaggttttattattaaataacgttgggtttattcgggtcggaaaattagagtttcgtcgatttttattttgttttttttgggcgttatttatattttgcgggaggttataagagtagggttaacgttagaaaggtcgtaaggggagaggaggagtttgagaagcgttaagtatttttttcgttttgcgttagattattttagtagaggtatataagttcggtttcggtatttttgtttttattggttggatatttcgtatttttcgagtttttaaaaacgaattaataggaagagcggatagcgatttttaacgcgtaagcgtatatttttttaggtagcgggtagtagtcgttttagggagggacgaagagatttagtaatttatagagttgagaaatttgattggtatttaagttgtttaattaatagttgtcgttgaagggtggggttggatggcgtaagttatagttgaaggaagaacgtgagtacgaggtattgaggtgattggttgaaggtattttcgttgagtatttagacgtttttttggtttttttggcgttaaaatgtcgttcgtggtaggggttattcggcggttggacgagatagtggtgaatcgtatcgcggcgggggaagttatttagcggttagttaatgttattaaagagatgattgagaattggtacggagggagtcgagtcgggtttatttaagggttacgatttaacgggtcgcgttatttaatggcgcggatacgtttttttgttcgggtagaggtatgtatagcgtatgtttataacggcggaggtcgtcgggttttttgacgtgttagttaggtttttttttttttcgtagatcgtgtgtttttttatcgttttttttcgagattttttaagggttgtttggagtgtaagtggaggaatatacgtagtgttgttttaatggtatcgttaattaagtaaggaagttatttaatttaaaattatgtatgtagaatatgcgaagttaaaagatgtataaaagtttaagatggggagaaaaatttttttttagagggtattgtgttattgtttttttgttttttatttattttagaaattatttgtttatatttaaaggtataatttattttgagttttttttaaaataaatcgtttgtagttttaggataggttgatgtattttgggtttgatttttgattattttattgttaaattagtgattttttttagtgtttttttgttttttatttcggaggacgtatttcgaagatattagattttatgggttatttttggattttgaagtttataattgtgataaaaaatgtgaagggaagagatttgaaatatgtggaaggaaaagtgagtgtagattataaatttttaaaaagataagtttaaaatatatttaaacgttatgttagattattttgttaaaattagttgttagtgacgttcgtacgttaatagaaaaaagaatgttttagtttggagtggtaggtttttagagggatttattgtgaaagtataaattatttagggtaatgggattgagagaatagtgggtagaaaggattattgaaggaaaggaagagaattggaaggtagatgaaagaaggagtaagaatttggggatgtttttttttttttatttgtaatagtagtaatagaagtaatggtagattggtttttgtttttattgtgttagaatgaattgataggataattgggtttattattgtattgtgttagaatattgtaaaataaaattaaatatattagtttggtggtttgtaattaattatttaagtggagatttttattttttttttattttttttttagacggagttttattttgttatttaggttggagtgtagtggcgcgattttagttgattgtaattttttttttataggtttaagggagatttttttgttttagtttttcgagtagttaggattataggtatgtgttattatatttggttaattttgtatttttagtagagatgggatttttttatgttggttaggttggtgttaaaattttcgattttaggtgaatcgtttgttttagttttttaaagtgttgggattataggcgtgagttatcgcgttttgtagttttttgtatttttaatagagatagggttttattatgttagttaggatggtttcgattttttgattttaggtgatttgttcgttttggttttttaaagtgttgggattataagtatgagttatcgcgttcggtttaagtggagatttttatatggagtttagttatattttttttaatatataagttgagatgattaatataattttaatataggggtttatgagaaatgtttgtaatatttaagtaatttattgtttttttttttttttttttaagatgaagttttattttgttgtttaggcggaagtgtagtggcgtgattttggtttagggtaatttttgttttttggttttaagcgatttttttgttttagtttttcgagtagttgggagtataggcgtgtatgattatattcggttaatttttttatttttagtagagacggggtttttttatgttggtcgggttggttttgaatttttgattttaggtgattcgtttattttagtttttttaagtgttgggattataggtgtgagttttcgtgtttagtttattattttatttttgaataaagaattgtttgtgtggggaatagataatttttttttatgtagtttttgttagaaaatttgttttttttagtagttggtttgtgtttataggttattttttgaaagtataaaaaatttattgattttttttttttgggtttttttttttttttgagatagagttttgtttttgttgtttaggttggagtgtaatggcgcgattttagtttatcgtaatttttattttttgggtttaagtgatttttttgttttagttttttgagtagttgggattataggtatgcgttattatgtttggttaattttgtatttttagtataaatggggtttttttatgttggttaggttggttttaaatttttgattttaggtgatttattcgttttggttttttaaagtgttgggattatgggtgtgagttattgcgtttggttagaaaatttattgattttttaaagatttattaattttttgtattattttttttttttttttttatcgtaaatataaaagggaatagtagagaaaattatttagaattttattttttagtgatattatttagtgatattttattagagttatttaggaatttgaggttgaataaagtttaggtaaaagtaaaattagttgagaagagatatttgttaaaagaaatttatttttaattttatttgttgttttttttagaggaatagaaatagtgttgaatgttttattagaaatgatggttgttttgttcgtttttttttttttttttatataatatgtaaatttatatagtgtatgagtttgtaagataaaggaaaaatacgttaatgaggtattattgtttgtatttggagtttgttattattgtttggtttatattaaaatatgtatattagagtagttgtagattgataaattattttttgtttgatttgttagt

SEQ ID NO: 139 - DNA, 8093 bp, Artificial Sequence
  chemically treated genomic DNA (Homo sapiens)
attggtaaattaaatagaaaataatttattagtttgtaattattttaatgtatatattttaatatgagttaagtaatgataataaattttaaatataaataatagtgttttattaacgtgttttttttttgttttataggtttatatattgtatgagtttatatattgtgtgagagagagggaagagacgggtagagtaattattatttttaataggatatttagtattatttttgtttttttaggaaagatagtaagtgaagttaaaaatagattttttttggtagatgtttttttttaattaattttatttttatttgaattttatttagttttaggtttttaagtgattttaataaaatgttattaaataatgttattaaaaaataaaattttgaatgattttttttattatttttttttatatttacgatggaggggaaaaaaaaaagtaatgtagaaagttaataaatttttaggaagttaatgaattttttggttaggcgtaatggtttatatttataattttagtattttgggaggttaaggcgggtggattatttgaggttaggagtttgagattagtttgattaatatggagaaattttatttgtattaaaaatataaaattagttaggtatggtgacgtatgtttgtaattttagttatttaggaggttaaggtaggagaattatttgaatttaggaggtggaggttgcggtgagttgagatcgcgttattgtattttaatttgggtaataagggtaaaattttgttttaaaaaaaaaaaaaaatttaaaaaaaagaagttaataaattttttgtgtttttaaagagtagtttataagtatagattaattgttagagaaaataaattttttagtaggggttgtatgagaaagagttatttattttttatatagataattttttatttagaaataagataataggttgggtacgggggtttatatttgtaattttaatatttggggaggttgaggtgggcggattatttgaggttaggagtttaagattagttcggttaatatggagaaatttcgtttttattaaaaataaaaaaattagtcgggtgtggttatgtacgtttgtatttttagttattcgggaggttgaggtaggaagatcgtttgaaattaggaggtagaggttgttttgagttaagattacgttattgtattttcgtttgggtaatagagtaagattttattttaaaaaaaaaagaaagaagataataagttatttaaatattatagatattttttatgagtttttgtattgaagttgtattagttattttaatttatatattaaaaagagtataattggattttatataaaaatttttatttgagtcgggcgcggtggtttatgtttgtaattttagtattttgggaggttaaagcgggtagattatttgaggttaggaaatcgagattattttggttaatatggtgaaattttgtttttattaaaaatataaaaaattgtagggcgcggtggtttacgtttgtaattttagtattttggaaggttgaggtaggcggtttatttgagatcgagagttttgatattagtttgattaatatggagaaattttatttttattaaaaatataaaattagttaggtgtggtggtatatgtttatagttttagttattcgggaggttgaggtaggagaattttttttgaatttgtgaggaggaggttgtagttagttgagatcgcgttattgtattttagtttgggtgataaagtgagatttcgtttaaaaaaaaaataaaaaaaaaataaaaatttttatttaagtaattaattataagttattaagttagtatgtttagttttgttttatagtattttggtatagtataataataggtttagttgttttgttaatttattttaatatagtagaaataaaagttagtttgttattgtttttgttattattattataagtgaaaaggaaaaaatatttttaggtttttgtttttttttttatttattttttaatttttttttttttttttagtggttttttttatttattgtttttttagttttattgttttgaatagtttatatttttataataaatttttttagaaatttattattttaaattgaagtatttttttttttattaacgtacggacgttattaataattgattttaataaaataatttgatataacgtttaggtgtattttgggtttgtttttttggaagtttatagtttgtatttatttttttttttatatgttttaaattttttttttttatattttttgttatagttataagttttaaaatttaaggatgatttataaaatttggtattttcgaagtgcgtttttcgaaataaaggataggaaaatattaagaggggttattaatttaataatagggtaattagaagttaagtttaaagtgtattagtttgttttaaaattataaacgatttgttttgaaagaaatttaaaatgaattgtgtttttggatgtgaatagatgatttttggaatgaatgaaaagtaagaaaatagtaatatagtattttttgaaaaaaggtttttttttttattttaagtttttatatattttttaatttcgtatgttttgtatatataattttaaattaagtggtttttttatttagttaacggtattattaagataatattacgtatatttttttatttatattttaaataatttttaaaaggtttcgggggagagcggtaaagaaatatacggtttgcggaaaaggagaaggtttgattggtacgttagggaattcggcggttttcgtcgttgtgggtatgcgttgtatatgtttttgttcgggtaaagaggcgtgttcgcgttattgagtgacgcggttcgttaagtcgtagtttttaagtgagttcggttcgatttttttcgtattagtttttaattatttttttgatagtattagttggtcgttggataatttttttcgtcgcgatgcggtttattattgtttcgtttagtcgtcgaataatttttgttacgaacgatattttggcgttagaagagttaaggaaacgtttagatgtttaacggaagtgtttttagttaattattttagtgtttcgtgtttacgttttttttttagttgtagtttacgttatttagttttattttttagcggtagttattgattggatagtttgaatgttagttaaattttttaattttgtgggttgttgggttttttcgtttttttttgaagcggttattgttcgttatttagaaggatatgcgtttgcgcgttagagatcgttgttcgttttttttattggttcgtttttaggagttcggggaatacgaaatatttagttaataggagtagagatgtcggaatcgggtttgtgtgtttttgttgaggtgatttggcgtagagcggaggaggtgtttggcgttttttaggttttttttttttttttgcggtttttttaacgttggttttgtttttgtggtttttcgtagaatgtggatgacgtttaaaagaagtaagatggaagtcgacgaggttttagtttttcggttcgagtggatttagcgttatttggtggtggagttttcggagggcgatggggttttgtgtttggtttgtcgtcgttttatcgtagttattcgcgaacgcgacgttaggcgttattacgaggttgagtacgaatattacgagcggtatgtggcggacggcgagcgcgcggttttggtggagcgtttgcgttagggcgatttgttcgtggttttttttatttttgaagagagagttgttcgtgtaggtttcgggttttgtcgttttttggttttgaagggtcgcggttggggtgagggggattttgtatattagtgtatggaggtgttgttgagagaggtattgttcgagtatgtaagcgttttgtaaggcgttgatttatttttagatattataaggtagaggattttgagtattgataggaatttacgtaattagttttttaatcgagttagggattttaaagtttatttttttgttttggacgattaggtttttgtggtttatgagaattattttttggtttttattcgcggtgtaggttttgagttggaggtgtaagaagattttttgattataattaatttgatttattattttagtgttggtgcgtttatgtcggtaattttagagtttttgtagatagtagggtttagtttgtagagaatggttggattgattacgatttatattttgaggatgattggtgagaatttaggattcgttttatatatgagagaaaaggtcgtaagttttaattgttggaatgttatttattatttaggatttttttatttggaattgttgagtttttatgatgtagatgttaattagattataaatattatattcgaatggatagttttgattaagattagaggcgttaggcgatttgaattttagattttattaacggaatttgaattagagtatggtgaaagggttaatggacgatgtttgaataattggtttaggagagggaaaattttaaaattaatattttttttaagaaaagaaatggaagcgtttttggttttagtaggggtaataatagtttattttttagataaataatggttttgtgattttggttttttggtggatattatggaatattttcgagaatttagtgaagaattacgagttagtaaagtttttgttgttgttgtttttgattatatttgtattttcgaagttaagttgaatttattttaaagatatattgaggaaaaaaatttaatagatttttttgtttttagagaagttgttgatgagttaaaatagtaaaataaggaagatgaaaaaatatttgattttgataggtattaaatggtgatttgtcgtttttaaaaagaatttgagagatattttaaggattttaggtttattaaaaaggatttagaattttttttaaatttatttaattttaaatttgaatatgtatttattttagtgagggtggagttaataaaattttaggtaaatattaatttttggaatgaatatagaattaaagatttggggtagttttatgttggattgtttgttgaattttatttaattattaaaggggttgtttgtaaggtggtatttttgtttgatagtaattaaatttgtgaaaaggtttttttatatttgattcgaaattaatatattttgagttagttattaatagatgagtatttttaagttttgtttcgggttgttataattgaaatggagttcggttgggatgattttgtgagagaaagaaatgaatttaatttataaggttttgtagtataagattgaaaaatttaataagaatttaattttaaaagtaaaaattggtttgagtttttaagtttattaatttggattgtgagaaagtattaagtattagtcgtttaaattgattataattaaaattttgatagttgtttttttttttattttaaatggtagtatgggattgaaatatgagaatgttattttttttaaaatttagtttagtgataaagttattgttttttatgatatagttaattttaaagagatttagtattaatgtgagttgaatttgtagtttgttttttaggtgttttgaagataaatgttaaaaattttagtttttattttaatggagtgttaaaattttgatttatatagttttaaattattaattttttaaatgtgtttttgaattaatttgtagaagtttatatagtaagtttataagtttttaaaaaggaagtttatatataatagtggaggtgttttgtttaattattaaaatgtttgagatttttttttaaatatttttgagttcgaaggtaatattgatagatttttttttttttttttttttattatttattttagtgataatatattattgatagaggaagttattagaattatttttaagttttagatataggagattttatgtaatttggagataagattaattattgggggttttttttggattttttttttaataattgggggttattttattagtttgtttattaaaggattatggtaagtatagaattttaatggttgttagttagtaattttttttttttttttttttattgtagatataagtttggttttattaaaaacgatgaggaaaaaagattgtattttaggattaggaggtgtgagatattttagtttttttgttttatttgcgtgggtattgttgttttattttaaaaaattttgtttaaagtaaatattttgttttaaaatgatatagtattagattttgttagatgttagaaatggatttattttaaaatttggaattgtcgtatatattttatatgtaagatagtatataagtagaaatatttaaaagtagttttatttatagattgtagtaattttgtatttttattaagataatttgttttgtgttaaaatagtaatttttaaatttttgtttattatgaaaaggtaattttaaagtttattatgtaaaattaattataaataggatttaatttatatttatagatttttttaagtattatataatttaaaaatttttgttttaaagttttgttttaattattgaaatattttaatttgtggttattaatttagtaaatttaaggaattaggttatgattaagaatttaggtggaattgatgtttgggtaattaaaataaatggtataagagtttaaaaattaaagttgtgttagtggtttttaattagaggtagtaatttgttattttagaggatgttgagaaatgtgtaggggtatttttttggttgttatatttattaggggtttttgttggtatttaagtttaaagatatttatttttgtagtgtatgggatagtttggtataatgaagaattagtttttttaaaatgtagattattttattttaagggatagggtagattattattagaagtaaaattaaaagtataagttgggtaaattgatagaatattagataggagagattaattttaattttttaaatttggttagtaaagtgtaataaaggtattgataagttttgttagtttattatagtatttgtaaattaggaattaataattgaattagatttaagggttttgttttgttatatatatttaaggtagaaaaaaagttatatgtcgattaggtatttattaagaatggttaagttgagattttggttaatagagtaagtttatatatttagagaaataatatagtggaaaatcgaaaaaaaaaaatagaaaaatttatcggtaattttttaatagttttgaatatttatagtagagttttattatttgagagaaagattggaagatttgaaagttatttttgttttttaattttagttttttaaatattgaaattttgtatattttgtgaaattttagtatgttttgtttaaggtgttaataaaattagtttgtattatgtagttattgagtgagggggagatataagttaaggattttaaattgatttttagttatagagaatttgttataagttagttttgtttgtaaaaaaaaaaaaaaaaaaagaaaaagaaaaaagtgtattttattgttttttgtattaagtaattttgtaattgtatggtagtttttttttttttaaataaatatagttgttattggttttgttgtagtagtgaatatagttaaaatacgtatattaaaaaaaaaattattaggtttttattagttattgttttatagtttatttttattagtttttttgatagatttgtatttttagtgtttcgtattgttatttaaattgttttattatgttaagtttttgttaatagttttattttttttgaaatatttgaatatttgatgattttagttttgaggagatattatttttaggtgtgtttttttagtttttgtaggtattttttttttttaatatttgtttttcgtatttttaaaaaaatttgttttagattgttttgttttgtgttagttcgttagttgattttatttttttttatgg

SEQ ID NO: 140 - DNA, 6521 bp, Artificial Sequence
  chemically treated genomic DNA (Homo sapiens)
ataaaattatgtatgggtaaaagatttaattaggtgtagtttagaaaaacggattttttttttttttttgagatagagttttgttttgttatttaagttggagtgtagtggtgtaatttcggttaattgtaattttcgtttcgtaggtttaagtgatttttttgttttagtttttcgagtggttgggattataggcgtgtgttattattatatttgattaatttttgtagttttagtagagacgggagggttttattatgttggttaggttgtttttaaatttttgattttaggtgatttatttattttagtattttaaagtgttgggattataggcgtgagttattatgtttagatttaaattttttttgttttttttttttttttgggggtggggggtagggttttattttgttgtttaggttggagtgtagaggtttgattttggtttattgaaatttttattttttaggtttaagtaatttttttattttagtttttcgagtagttgggattataggcgtgtattattatatttggttaattttttgtatttttggtaaagacggggttttgttatgttgtttaagttgtttttgaatttttgggtttaagcgatttttttgttttatttttttaacgtgttggaattgtaggtatgagttattatgtttggaataaagttttattttttaagtggattatttaaaaaaatgttttatggttaggtacgttatttttttttagtttgggtaagtgagtcgagattgtgttattgcggtttggtttgagcgatagagggagattttattttagataaataaataaataaaattaaaataaatttaaatattttttatatgataaaattatttttaatggtaattataaaatgaataataagggttaagaaataaatttagtgaatattttttttttttgaattttgtaaatataattatgttagtataaaaatagttatgtattgtttaataatagggatatgttttgagaaatgagttattaggtaattttgttattgtgtaaatattatagagtgtatttttataaatttagatggtgtagtttattatttatttaggttatatggtatagtttggtgtttttaggttttaatgtttatagtatgttattatattgaatattgtaggtagttgtaagataatggtatttgtgtatttattgtagagatagggttttttcgtttgtcgtttaggttggagtgtagtggtataattatagttttttgtagtttttaatttttgggtttaagtgatttttttattttagttttttaagtagttaggattatacgtttgtgttattaggtttgtttattgtttttgtttgttttttggtagagatggagggttttattatattgtttagattggttttgaatttttggttttaagtaatttttttgttgttttggtttttaaagtgttggtattataggaatgagttaaaagtttaatatggttgttgaataaaagattgatttaattaagtacggattttgtttttatggagttgaaggtcgttagagtagataaaatgagttattatttttatatgagttagacggtggataaagttattattgagggtaggtaaagaattgggttggtttaaagatgttagggattttttttagattagtggtagagggttggttaaggagttttttgaaggaggtggttttttatttgagttttaaagaatagaagagattagatagggaggatagtaaaatttttttttttttttgaaatagtttcgttttgtcgtttaggttggagtgtagtggcgcgattttggtttattataagttttgttttttgggtttacgttatttttttgttttagttttttgagtagttgggattataggcggtcgttattacgttcggttaatttttttttttttttttttttagtagagacggggttttattatgttagcgacgatttttgtttgtttgtttgtttttgagatagagttttattttgtcgattaggttggagtgtagtggcgcgatttcggtttattgtaatttttgttttttaggtttaagtgatttttttgttttagttttttgagtagttgagattataggtgtttgttattatgtttagttaatttttgtatttttagtagagacggggttttattatgttggttaggttggtttcgaatttttgattttaggtgatttgtatatttcggttttttaaagtgttggtattagaggtatgagttattgtatttggttagtaaaattatttgtgatatagtagtaagtgtataagtattgatttattagagttgaaggtggttgaggtatttaagtgggtttttggggattttgttatgttagggaatatttttttagataagggattaggaggtttggagggtttttaaggaagagttagggtagtaggggtattttggagttaggggttatggttatatgttaataggattagaaatattttaatgtatttaattaatttatataattatattggtgggtgtttattgaatattagttttagatatggatttgaaatggttttatttttttttagtttgtttaagttaatggagttttattagaatgtgagttataaaatagtagagttattttttatttaatgttgtatttgtagggtttagaatagtatttgaaggattggcggaggtttaataaattgttaaaagggtagattagttaggtgtgatggcgtgtgtttgtagttttagttatttgggaggttgaggtaggaggattatttgattttaggatttttgggttgtagtgtagtatattagttaggtgtttgtattaagttttgtattaatttggttgtttaaggatggttgaattgatttaggtggaaattggagtaggttaaaatttaatgttgattagtaatagggtcgtatttgtaaatagttatcgttttttagtttgggtaatatagtgagattttatttttaaaataaattttaaaaataattaattagaaaaaaaaattagtttgtaattttagtattttgggaggttaaggcgggtagattatttgaggttaggagtttaagataagtttggttaatatggtaaaattttaatttttattaaaaatataaaaattagttgggcgtggtggtaggtgtttgtagttttagttatttaggaggttgaggtaagagaatcgtttgaatttgggaggtggagattgtagtgggtcgagatcgcgttattttattttagtttgggtagtagagtgcgattttgttttaaaaaaaaaaaaaaagaaagaaaagaaaagaaaaagaaaagaaaagaaaaaaattgggaggtttaagtttatttttggtgtttttatatttttttgttttatttttttgtatttagtttttttttgtaatttgtgttttatattagtttttaagtttttaacgtgatttagtatgagaattggattttgttatttttttgtttataatattttatgttttttttttgtttagaatattattttttttattgtttttattaatggaattggtatttttttaaggatatgattaaatttgtttatttttatattattttttaaagtagaatttatttttttttttttaatatgatgatattgatagggtttgtttttatttattagattgtgagttgtttagggtaggtagcgttttttgtttttgtttttgttttttttttttgagatagggttttgttttgttatttaggttagagtgtaatggtatagttttagtttattgtagttttaatcgtttcggtttaaattattattttattttagttttttgagtagttgggattataggtatatgttattatatttggttaatttttttgtatttttagtagagatagggtttggttatgttgttcgggttggtttcgaatttttggatttaagtaatttatttattttagttttttaaaatgagggatcgtgttttatttatttttatgtttttagtttatagtttagtgttggatttatggtagtattaaataaatatttgttgaatgtaatagtaaatagtattttagggagtaagaattagattaataaaggtggtaaaaggtttggagaaaaaaataatagtttaatttggttagagtatgagggagagtagtaggagataagatggaaaggttttttgggtaaggttttgaaggaagttggaagttagaagtatataatgtgtatatcgtggtaggtagtggggagttaatgaaggtttttgagtaggagagtaatgtgttgaaaaataaatataggttaaatttattagagtttttttgatatatatatttgttttttatttaagtttaagtttgttttttatatatttattatttaatttattttcgggtttttttagtagtttgttttatttttttatttgttttttggtggagttagggatgtatatatgagttgtttttttttttagttagaggatatgggggttttagtttttttgtttttttttttttgtgtttggagttgggaagtaggttagggttagttgaggttggttggtaagtagttgggtggtgttagggagagtttgtatagtgttaggtggtgttttgggttttaagttgagtttatggtttcgataattttttgtttgtgtatatatttgttttttattttatttttattttagttttggtatgggggagagggtatagggttagataaatttgtgagattttggttttatttttgtaaaagggcgttttgtgagttagtttgtttttttttaggtttgttttttttttatttagttttcgtttttaatgtacgtatagttcgtatatatcgtgtgttgggatattttatagttagtcgtatggtttttttgtgttttagtttttggttttttttgttgatttcggtttttgttttaggttttattgtgtaattgttgttgttattgttgtttttggtgtttgtttatttttagaggttgtttcggatgtaggaggatttttttttgggaggaggtttttttggggaagatgatttattgggcgaggaggatttgtttagtgaagaggatttatttagagaggaggatttattcggagaggaggatttatttggagaggaggatttatttggagaggaggatttatttgaagttaagtttaaattagaagaagagggttttttgaagttagaggatttatttattgttgaggtttttggagatttttaagaattttagaataatgtttatagggataaagaaggtaagtggttattaatttttaaatttaggttttaggaggtttatgattttttttttatattttagtttaggttttgtttatttagggaaggaggggagattgtattttttatagaagtttttttagaggttttatattaatatttttatttttattttcggaggtagaaagggatagatgtggagagaaaataaaaagggtgtaaaaggagagaggtgagttggatgagatgggagagaagggggaggttggagaagagaaagggatgagaattgtagatgagagaaaaaatgtgtagatagaggaaaaaaataggtggagaaggagagttagagagtttgaggggaagagaaaaggaaagtttgggaggtgaagtgggtattagagataagtaagaagagttggtagaagttattttattttaggttataatgaggaaattgagatttaggaagaagggatatagtaggtagagaaacgtggttttttgatttttaagttaggaatttggggaaaggggttggagattatataaggtagagggatgagtggggagaagaaagaagggagaaaggaaagatggtgtatttatttatttgggatttaggattgaagtgtttatttattttttttttttttttttttgagataaatttttatttttgttgtttaggttggagtgtaatggcgcgatttcggtttattgtaatttttatttttcgggtttaagtgatttttttgttttagtttttagttaagtagttgcgattataggtatgcgttattacgttcggttaatttttgtatttttagtagagacggggtttcgttatgttggttaggttggtttcgaatttttgattttaggtgatttaattattttggttttttaaagtgttgggattataggcgtgagttatagcgtttggtttgaagtagttatttatttttatagattttaagataatgattgtaagttggtaggattgttgtttggtttatttagttgcggtgttgagtttgggtgcggttttttgtgttttgtatttggttcgtttaaggtatttgttattcgtaatgtttttgtaaggtatttgcgtttgtgatatcgttttggtcgttaggaagggattggggttttaagtttgagcggtttattttttttatttatatagg

SEQ ID NO: 141 - DNA, 6521 bp, Artificial Sequence
  chemically treated genomic DNA (Homo sapiens)
tttgtataaatgaaaaggatgaatcgtttaagtttagagttttaatttttttttggcgattaaaacgatgttataaacgtagatgttttataggagtattacgggtaataaatgttttaagcgggttaggtgtaaagtataggagatcgtatttaaatttaatatcgtagttgggtgggttaaatagtaattttattagtttgtaattattgttttagggtttgtaaaagtgagtggttgttttaggttaggcgttgtggtttacgtttataattttagtattttgggaggttagggtggttggattatttgagattaggagttcgagattagtttgattaatatggcgaaatttcgtttttattaaaaatataaaaattagtcgggcgtggtggcgtatgtttgtaatcgtagttatttggttagaggttgaggtaggagaattatttgaattcgggaggtggaggttgtagtgagtcgagatcgcgttattgtattttagtttgggtaataaaagtgaaagtttgttttaaaaaaaaaaaaaaaaaaagtgagtgggtattttagttttgagttttaaatgagtgagtatattattttttttttttttttttttttttttttttatttatttttttgttttgtatggtttttaatttttttttttaaatttttggtttgggagttaagaagttacgtttttttatttgttgtgttttttttttttaggttttaatttttttattgtagtttaagatgagatgatttttattagttttttttgtttgtttttggtatttattttattttttaagtttttttttttttttttttttaaattttttgattttttttttttatttattttttttttttgtttgtatatttttttttttatttgtagtttttattttttttttttttttagtttttttttttttttttattttatttagtttatttttttttttttgtattttttttattttttttttatatttgtttttttttattttcgagagtggggatggggatattggtatgggatttttggaagggtttttgtggggagtatagttttttttttttttttgagtgaatagagtttaggttggggtatgggaggggagttatgaattttttggaatttggatttggagattgatgattatttattttttttgtttttgtgggtattattttggggtttttgaggatttttaggagttttaatagtaggtagattttttaattttagggagttttttttttttgatttaggtttaattttaggtagatttttttttttaggtagatttttttttttaggtagattttttttttcgggtggatttttttttttgggtgaattttttttattgggtagatttttttcgtttagtgggttattttttttagaagagtttttttttaagggggaatttttttgtattcggggtaatttttggggatggataggtattagaagtagtagtgatagtagtagttgtatagtgaggtttggagtaggggtcgggattaatagagggagttaggggttggggtataggggagttatgcggttgattgtggggtgttttagtatacggtgtgtacgggttgtacgtgtattggaaacgagagttgggtgggggaggagtaagtttggaggggagtaggttgatttatagagcgtttttttgtagagatggagttaaagttttataggtttgtttggttttgtgtttttttttttatattaaagttaggatgggggtggagtgaggggtaggtgtgtgtataggtagaaggttatcggggttatggatttagtttggaatttaaggtattatttggtattatgtaggttttttttggtattatttagttgtttgttagttagttttagttaattttggtttgttttttagttttaggtatagaaggggaaaggtaggggagttggggtttttatgttttttggttgagagggaaagtagtttatgtatatatttttgattttattaggaagtaggtaaagaggtagggtaggttgttaggggagttcgagggtgagttaagtaatgggtatgtgggagataaatttgagtttgaatgaaaagtaagtgtatgtgttagaggggttttgataggtttaatttatatttattttttaatatattatttttttgtttaaaagtttttattggttttttattgtttgttacgatatgtatattgtgtatttttgatttttaattttttttaaaattttgtttaagagatttttttattttgttttttattatttttttttatattttagttaaattaaattattatttttttttttaaattttttattatttttgttaatttagtttttgttttttgaaatgttatttattattgtatttaataaatatttatttagtattattataggtttagtattgggttatggattagggatatggaaatgaataagatacggttttttattttgggaggttgaggtgggtggattgtttgagtttaggagttcgagattagttcgggtaatatggttaaattttgtttttattagaaatataaaaaaattagttaggtgtaatggtatgtgtttgtagttttagttatttaggaggttgaaatgggatgatggtttgagtcgaggcggttgaggttgtagtgagttgagattgtattattgtattttggtttgggtgatagagtaagattttgttttaaaaaagaaaaataaaaataaaaataaaaaacgttatttgttttgagtagtttataatttagtgagtgagggtaaattttgttaatattattatattgagggaagagagatgaattttgttttagaagataatatagaagtaggtaaatttgattatgtttttgaagaaatattagttttattggtaaaaataatagggagaatgatattttgggtaaagggaaggtataaaatattatgagtaggagagtgatagaatttagtttttatattaggttacgttgagggtttgagggttagtatggagtatagattgtaggggaagattgggtgtaaggagatggggtagaagagtgtgaggatattaagaatgggtttaggttttttagtttttttttttttttttttttttttttttttttttttttttttttttttttttgagatagagtcgtattttgttatttaggttggagtgaagtggcgcgatttcggtttattgtaatttttattttttaggtttaagcgatttttttgttttagttttttgggtagttgggattataggtatttgttattacgtttagttaatttttgtatttttggtagagattggggttttgttatgttggttaggtttgttttgaatttttgattttaggtgatttgttcgttttggttttttaaagtgttgggattataggttggtttttttttttaattaattatttttaaaatttattttagagatgggattttattgtgttgtttaggttggagggcggtggttatttataggtgcgattttgttattgattagtattgagttttgatttgttttaatttttatttgggttagtttaattatttttaggtaattaggttgatgtagaatttagtgtagatatttgattggtatattatattatagtttagaaattttgggattaagtgatttttttgttttagttttttaagtagttgggattataggtatacgttattatatttggttagtttgtttttttaataatttattaagttttcgttagttttttaggtgttgttttaggttttatagatgtagtattgaatagagaatagttttattgttttgtagtttatattttagtaaggttttattggtttaaataaattaaaagagaataaggttattttaggtttatatttagggttaatatttagtaggtatttattaatatggttgtgtaggttaattaaatatattaagatatttttaattttgttggtatatagttatggtttttagttttagggtatttttgttattttagtttttttttagggattttttagattttttgattttttatttaaagaggtattttttggtataatagagtttttaggagtttatttgagtgttttagttatttttaattttgataggttagtgtttgtgtatttgttgttgtgttataaatagttttattggttaggtgtagtggtttatgtttttaatattagtattttgggaggtcgaggtgtgtagattatttgaggttaggagttcgagattagtttggttaatatggtgaaatttcgtttttattaaaaatataaaaattagttgggtatggtggtaggtatttgtaattttagttatttaggaggttgaggtaggagaattatttgaatttgggaggtagaggttgtagtgagtcgagatcgcgttattgtattttagtttgatcgatagagtgagattttgttttaaaaataaataaatagataaaaatcgtcgttaatatagtgaaatttcgtttttattgaaaaaaaaaaaaaaaaaaaattagtcgggcgtggtggcggtcgtttgtagttttagttatttaggaggttgaggtaggagaatggcgtgaatttaggaggtaaagtttgtagtaagttaagatcgcgttattgtattttagtttgggcgataaagcgagattgttttaaaaaaaaaaaaaaattttattgttttttttgtttaattttttttgttttttgaaatttagatgaaaggttattttttttaggaaattttttaattaattttttattattagtttggaaaagatttttggtatttttgagttaatttagttttttgtttgtttttaataataattttgtttatcgtttaatttatataagggtgataatttattttatttgttttaacggtttttagttttataagggtagggttcgtatttgattgagttagttttttatttaatagttatattgagtttttggtttatttttgtaatattagtattttggaggttaaggtagtaggaggattgtttgaggttaggagtttaaaattagtttgagtaatatagtgagattttttatttttattaaaaaataaataaaaatagtagataggtttgatgatataagcgtgtagttttagttatttgggagattgaggtgggaggattatttgagtttaggagttggaggttgtagggagttatgattatgttattgtattttagtttgggcgatagacggagagattttgtttttatagtagatgtataaatattattgttttataattgtttatagtatttagtatggtaatatgttgtaagtattggggtttaggagtattaggttatattatgtagtttagatgggtaataggttatattatttaggtttgtgaaaatatattttatgatgtttgtataatgataaaattgtttagtgatttattttttagaatatatttttgttgttaagtaatgtatggttgtttttatgttgatatgattatatttataaagtttaaggaaagaaaatatttattgagtttattttttggtttttattatttattttataattgttattgagaataattttgttatataaagaatgtttaaatttgttttaattttatttatttatttatttgagatggagtttttttttgtcgtttagattagatcgtagtggtataatttcggtttatttgtttaggttggagagaagtggcgtgtttggttataaagtatttttttaaatgatttatttgaaaaataaaattttgttttaggtatggtggtttatgtttgtaattttagtacgttgggagggtgaggtaagaggatcgtttgagtttaggagtttaagaatagtttgggtaatatggtaaaatttcgtttttattaaaaatataaaaaattagttaggtgtgatggtgtacgtttgtggttttagttattcgagaggttgaggtgggaggattgtttgagtttaggaggtagaggttttagtgagttaagattaagtttttgtattttagtttgggtaatagagtgagattttgttttttatttttaaaaaaagaaagaaaataagaaaaatttgggtttgggtatggtggtttacgtttgtaattttagtattttgggatgttgaggtgggtggattatttgaggttaggagtttgagagtagtttggttaatatggtgaaattttttcgtttttattaaaattataaaaattagttaggtgtggtggtggtatacgtttgtaattttagttattcgggaggttgaggtaggggaattatttgaatttgcgaggcgaaggttgtagttagtcgagattgtattattgtattttagtttgggtgatagagtaagattttgttttaaaaaaaaaaaaaaaattcgtttttttgaattgtatttgattggattttttatttatgtataattttgt

SEQ ID NO: 142 - DNA, 2891 bp, Artificial Sequence
  chemically treated genomic DNA (Homo sapiens)
  unsure (223, 366): unknown base
tttttttttttcgaattgtttttttttttggaggtggtggagggagagaaaagtttatttaaaatgtttttgggtgagggattaaggatgagaagaatgttttttgttttttatgtcgtggaataatataaaataaaaaatttcgagggaatatatattatatattaaatatagattattttagggagtaaataaattatgtgtggggttgggtaattagttnaagtcgaagcgtaaataaaatgtgaatatacgtttgcgggttatatatagtgtatttttattagtatttagaaaaaattgtgagttagtgaattaggaaattaatgtttggaaggtagttaaattttaattagtttaagattnttttttttttttaaaaaaaggtacggaagtaatatttttttttttttttttgattagaatcgatgtattttttgtgtatgatcgtatttttaataataaaaggggaaagaggatttggaaaggaattaaacgttcggtttgttcggggaggaaagagttaacggttttttttataagggtttttgttgattttttcggttcggtttataagttttttatttgttttttttaggaagttcggtttcgcggttcgggtattttttgttttttttatattttttcgtttagtatttttgattttttttaaattcggtagttcgagattgttgtaaatcggcgttatagggcgtaaaggggatttgttttttttgaaatttggttgagaaattgggaatttcgtgtgggaggcgtgggggtgggacggtggggtatagattggtagagagtaggtaatttttttttcgttttagtttagttttggaataggtagatatattttagggttaaatagacgtttttcgtacggggttttacggaagtttgagtaggcggggtaggagggtcggtatttgttgttttggtagtaaattgggggatttagtttgggtggaaggtatttaatttagatagttgtgtatatataatgtataatatatgattttttttaataaatgtaatgggagtttatttataacgcgttttttaagtatacgtggtaatgcgttgttgggttattttaattattttaggtatcgtttttttttttatgtttttattatttttttttatttatattaatattttacgttttgaacgcgcgtttattaatattttttttttttttattttttttgggatttttgattaaagcgcggttttttttttagttttagcgaggcgttttgtagtttggtacgcgcgtggcgtggcggtgggcgcgtagtgcgttttcggtgtggagggtagttgtttcgtttgcgatgatttatatttataggataaggatgcggtttgttaaatagtattgttacggaggagtagtagagaaagggagagggtttgagagggagtaaaagaaaatggtaggcgcgcgtagttaatttatgcggtttttttattttgtttatattttagagttagagtgttcggttgttcggttgagttttttttttattttttttattttttttattttttttataagcgtttttttcgggtttttaaagtagagggcgtgggggaaaagaaaaaagattttttttcgttaattttcgtttatcggttttttataatgcgagggtttggacggttgaggattttcgagttgtgttgttcgcggtcgttatcgtcgggtttcggtcgtttttggttttttttttgtttcgagaagggtagggttttttagaggtttggcgggaaaaagaacggagggagggatcgcgttgagtataaaagtcggttttcggggttttatttaattcgttgtagtaattttagcgagaggtagagggagcgagcgggcggtcggttagggtggaagagtcgggcgagtagagttgcgttgtgggcgttttgggaagggagattcggagcgaatagggggtttcgtttttggtttagttttttcgttgattttttaattagcggttcgtaatttttgtcgtatttacgaaattttgtttatagtagcgggcggatattttgtattggaatttataatattcgagtaaagacgcgattttttcgacgcggggaggttattttgtttatttggggatattttttcgtcgttgttaggattcgtttttttgaaaggttttttttgtagttgtttagacgttggatttttttcgggtggaaaattaggtaagtatcgaagtttatttgttttttaatttatttttttattattttaatgttgagatgagtcgaatgtttaaatagggtgtttttttttttatttttgcgttattgatattttttttagagtagttatggtaattggggttggggtggggggtaatttagaattggatcggggtaaagtgatttgttaagatggtagaggagaaggtagagggaaaacgggaatggtttttaagattattttttcgagatttttgttttatgaatatatttacgttgattttcggtcggtcggatatttttgttttattgtgttaattgttttttgcgttttggggggttgggggttgttttgcggtgggtagaaagttttttgtattttgagttttttggagtagggatcgtatatcgtttgtgtgagttagatcgtttcgtagtcgttgatttgttttcgttttcgggagggtatttaaatttcggtttatcgtatttttgatagtcggagacggatattgcggcgcgtttcgttcgtttgttttcgcggcgattgtaattcgttttgatttttttaagaagttggtatttggttttttaaaaaataataatataatttaaaatttgggtttttagaggtgttaggacgtggtgttgggtaggcg

SEQ ID NO: 143 - DNA, 2891 bp, Artificial Sequence
  chemically treated genomic DNA (Homo sapiens)
  unsure (2526, 2669): unknown base
cgtttatttaatattacgttttaatatttttagagatttaggttttaaattgtattattgttttttaaaaagttaaatgttaattttttaaaaggattagggcgggttgtaatcgtcgcggggataggcgggcgggacgcgtcgtagtgttcgttttcggttgttagaaatgcggtgagtcgaaatttaaatgttttttcggagacggggataagttagcggttgcggagcgatttggtttatataggcgatatgcggtttttattttaaggagtttaggatgtaaggggttttttgtttatcgtaaagtaatttttagttttttaaaacgtagagagtaattaatataataaagtaggaatgttcgatcggtcgggagttagcgtgaatatatttataaggtagaaatttcgaaagggtagttttaaaaattattttcgttttttttttgtttttttttttgttattttgataagttattttatttcgatttagttttggattattttttattttagttttaattattataattattttgagaaaagtgttaatagcgtaggaatgggagaaaagatattttatttaggtattcgatttattttagtattaaagtgataaaaaaataaattaaaaggtaagtggatttcggtgtttatttggttttttattcgaaaaaaatttagcgtttaagtagttgtaaggagagttttttagagaagcgggttttggtagcggcggggaagtgtttttaaatgggtagaatagttttttcgcgtcgggagagtcgcgtttttgttcgggtgttgtaagttttagtgtaaagtgttcgttcgttgttatggataaagtttcgtggatgcgataagggttgcggatcgttggttgggggattagcgggagggttgggttagaggcgaagttttttattcgtttcggatttttttttttaggacgtttatagcgtagttttgttcgttcggtttttttattttagtcggtcgttcgttcgttttttttgtttttcgttggaattattatagcgagttagataaagtttcgaaaatcggtttttatatttagcgcgattttttttttcgttttttttttcgttaagtttttgagaagttttgtttttttcgaggtaggaggggagttagggacggtcggggttcggcggtggcggtcgcgagtagtatagttcgggggtttttagtcgtttagattttcgtattataaagggtcggtgggcggagattagcgagagaggattttttttttttttttttacgttttttgttttgggaattcgggaggggcgtttatggggagggtggggagggtggggaaggtggggaggagatttagtcgggtagtcgagtattttagttttaggatgtaaatagagtaagagagtcgtatgaattaattacgcgcgtttattatttttttttgtttttttttaaattttttttttttttttgttgttttttcgtagtagtattgtttgataaatcgtatttttgttttgtgagtataaattatcgtaggcggaatagttgttttttatatcgagaacgtattgcgcgtttatcgttacgttacgcgcgtattaggttgtagggcgtttcgttaaggttggggaaagggtcgcgttttgattaagagttttagggagagtggaggaaagaagggtattaatgggcgcgcgtttagagcgtgggatgttagtgtagatagggaggaatgatagaggtataaggaggaaaacgatgtttagaatgattaaaataatttagtaacgtattgttacgtatatttggagagcgcgttatgaataaatttttattgtatttgttggggggagttatgtattatgtattatgtatgtatagttatttggattggatattttttatttagattgagttttttaatttgttgttaaagtagtagatatcggtttttttgtttcgtttgtttaggttttcgtggggtttcgtgcgggaggcgtttgtttagttttgagatgtgtttgtttgttttagagttgggttagggcgagagggaggttgtttgttttttgttagtttgtattttatcgttttatttttacgttttttatacggagtttttaattttttagttaggttttagaagagataaattttttttgcgttttgtggcgtcggtttgtaatagtttcgggttgtcgggtttgggagaaattaaaggtgttagacgggagaatatgggaggggtagggggtattcgaatcgcgggatcggattttttaaaaggggtaagtggagagtttgtggatcgagtcgggggagttagtagagatttttgtgaaaaaaatcgttaattttttttttttcggataaatcggacgtttaatttttttttaggttttttttttttttttattattggaaatgcggttatgtataaaaaatgtatcgattttgattaaagaagaggagaggagtattattttcgtgtttttttttggggggggggggnagttttgagttaattaaaatttggttgttttttaggtattaattttttagtttattgatttataattttttttgaatattagtgaaagtgtattgtatgtaattcgtaaacgtgtatttatattttatttacgtttcgatttnagttagttgtttagttttatatatgatttgtttgttttttgaaatgatttatatttaatatataatgtatattttttcgggattttttattttgtgttattttacggtatgaaaaataaaaaatattttttttatttttggttttttatttaaaggtattttaagtaaatttttttttttttttattatttttaaaagagaaaataattcgggggaaagggg

SEQ ID NO: 144 - DNA, 1092 bp, Artificial Sequence
  chemically treated genomic DNA (Homo sapiens)
aagttttttttttattatttaagaaggtatttaggtttttttgtgttaggttttaggtaaagtgttggattatttagtaattgggtttagtagtaggatggttttagattgaggttttagggttaaaggattatttttttttttagcgttggttcgggaaaggtaagtttcgggcgggagcgtacgtcgcgttttcgaagtttggttttttcgttacgtttattttttgtttttatttcgcgtttttttaggttttttttcggtgaatcggatgttttgttagttttttattttgcgttttcggtcgcggttcgggtttttcgtaaagtcgttgttatttcggagggtttagttagcgggttttcggaggttggtcgggtaggcgtggtgcgcggtaggagttgggcgcgtacggttatcgcgcgtggaggagatattgttttgtcgcgatgggggttcggggcgtttttttacgtcgtaggtaagcggggcggcggttgcggtatttgtttatcgggagttttttttttttttttttgttgttgttgttttgtatttagttcgggggaggatagaagaaaaaggaggtagaatggatttttttggtttttttttgtggtcgggggcgggttagggtgggtcgcgttgtttaggtagttttgtcgtgttgttaggtagtttggtcgtcggcgtgggcgatgtcggcgttggggcgggagtcgcgagggtgggaggttttggggcgttttcgggacgtggagttagtagggttttgatttgaaaaacgacggtaaagcgtgtttttgattgtttttgagtattttatattttttagatttagggcgtttttatttttagttggaagtttagtttagagtaatggtgttattaaaaggggtgtgttggatgtgaaaatattttttggaagtatttataagtttgtaggaaatatgttttttttatttttttattttgttttttttattatttattttaagaagtaatagaatttgtgtagagtgtgttttaagttatattgtatgtttatttttgtttatgttgaattcggtgtatatttgtgagaataagttt

SEQ ID NO: 145 - DNA, 1092 bp, Artificial Sequence
  chemically treated genomic DNA (Homo sapiens)
aagtttatttttataagtatatatcgagtttaatataaataaaaataaatatatagtgtaatttaaaatatattttgtataggttttgttgttttttgaaatgggtaatgaagggagtagagtaagaaaataaggaaaatatattttttgtaggtttataaatatttttaaagggtatttttatatttaatatattttttttagtggtattattgttttaagttgggtttttagttgggaataaaggcgttttgggtttgaaaggtgtgaggtgtttagaagtagttaagaatacgttttgtcgtcgttttttaagttagaattttgttaattttacgtttcggaaacgttttagggttttttattttcgcggttttcgttttagcgtcggtatcgtttacgtcggcgattaggttgtttagtaatacggtagggttgtttgggtaacgcggtttattttggttcgttttcgattataggggaaggttaaggggatttattttatttttttttttttttgttttttttcgagttggatgtagagtagtagtagtaggagaaggaagggaaagttttcggtgggtaggtatcgtagtcgtcgtttcgtttgtttacggcgtgaaggagcgtttcgggtttttatcgcggtagggtagtgttttttttacgcgcggtagtcgtgcgcgtttagtttttatcgcgtattacgtttgttcggttagttttcgggagttcgttggttgggtttttcgggatggtagcggttttgcgagggattcgggtcgcggtcgaggacgtagagtaggagattgatagagtattcggtttatcgggagaagatttggaaaggcgcgggatgggggtaggaagtgggcgtggcgagggagttaggtttcgggggcgcggcgtgcgttttcgttcggagtttgtttttttcggattagcgttgaggagaggagtggttttttggttttgggattttaatttgaggttattttgttattgaatttaattattgggtagtttagtattttatttggggtttagtatagaaagatttgaatgtttttttggatgatgaaggggaagttt

SEQ ID NO: 146 - DNA, 5203 bp, Artificial Sequence
  chemically treated genomic DNA (Homo sapiens)
agggaatttaacgttttttcggggtagaagggggtagcgcgcgcgaggcggaaggatagttattttcgttgtataaattttttcgcgggtcgcgtcgcgcgtgtaggggttggacgttattcggcgttagagtcgggtttgaggagcggggtttggtcgggaacgagggttgttagtttgggtggtgttatttgttgttttattttttatttttttttttttcgtgaggaattagaggtatcgggtcgcgcgggttgagaatttttaaatttttttcggtcgtattcggttgagttaattcgtagtttttgttagtttttttgtttttcgggtagcggtttttttcgttagttaggtttggaagttattttttgtgagattgggttaggaagtgacgaaaagcgtcgaattgtttttaaattgaaaatatttttttttttttttttggagatagcgttgataaatatatgggatttcggtttttgatttttggttgtcgtttttgtttttttgtcgttaataaaattcgtattgagttttttagtgttttgattaataggtagattaatttttattggggttgggaatagtttgttttaattaatgttattttaaaagttcgttaggatgcgtttagtttcggttttttggatgtttgagcgagttagttatgatatttgttttttttttttttttagttttaaattttttagtaaagtttttagttttcgtttgtttgtttttaggtttataacgggataaatcgtaggatcgggtcgttggtttttagaataggtagcggtttagagaggggatatttagggagaagggattgaggtggttttgatttgtttgttttttttttgaagttgaatttttgttttttgggggtagaggttatagggaaaagagagatggggggatcgttatagggtgatgaaatggaaagtaaatttttttaggaattttatttgtaaaaatcggagagtgtcgttgattttagttgttttatatgttaggagttttaaatttaatttttatttggataatagtatggagggattgggaggtaaagttttgggagtttgattcgttgggttgttaggaatttttttgttgggagattttattggataatgttattttaaaggtattttgggggtgggtagggagaagatagagagagaaagagagagagagagagagagagagagagagagagagagataggttggttttttagagcgaacggaagaggattgaggattgaatttagggagtttttagtattggttatttggtaggaggcgaggaagggcgagggtatcgcggtttttttttaagtcgagtagtggttatagtttgaaggtgttacggggcggttttgggatttttttggtttttttaggttttgggttcggcgaggttgtcgggttagcgggaatcggtaggttgttggagaaaggagagggataaaggtttggaagtgggggaggtattagggattgggcggtcgggatgggagtttttgtttttagggtttattggattcgtttgttagtttcgcggataagggattttatttttttagggtttgtaaaaagagagacgtttggggtattataaagtgacgtaggtgtttgttaagattttttttttttaaaaaatgttagtttttattttttttagcgcgtcggcgttgcgtttttgtttgatcggggaaagagagagtttggaggtgttagaattgttagaatttcggatgggaggtttttggttttgaagttgggagttggaggtatttttttttagaagtgggtatttttttgttttttcgaaggtttgatggggtgggtataggggaatgttagggatcggtgcgggtgagatgtttgttttattttatgttgacgtattaatattggttagaagttttgggtaggttttggcgagttacggttttttagcgggattttttttacgtagatagtttcgttatcgggtgggacgatttcggcggttttcgcgggaacgtattcgtcggtttgagaggttttttttttggttatagggggcggagggtaggggggaataggggtttgtggggaggcggggaaaggagatagaatttaaagcgtaattttcgtcgttttttcgcgttttggagggtagtaagtgggtttcgggcgtgttggtagtcgtaattaaaatggcgatttgcgagttgtttcggttttgtatatatttttggtaatcgcgttcgtattttagtttcggtttttatatttttaggtcgtttcgtttttagagtcggtatttggtagagggagtgaggttttttacgaggtagaatagtatttttattttttttgagattagtttagagagaacgaggaaattttatttttatttttttttttttaaattttgaaaattcggttttattttggggttgaatttttttttttaaatattgatatatgggaagtagttaagttttttttgttttttgtttgtgcggaggagtttttaggagtttttttcggagtttttttttttatttaatgacgttagtggtatttatttttcgttttttgttttttttgattttttgttaaaattttttttcgtagcgagatgggggttggaggggtgggagaaggagttgatttaaagagttagtgttttggggggaaatagtaataagattacggttgttttttttcgaggtaaagtttaagaaggtgttaatttattcggtcgttaattgagaggttgtaaaaatgatattcgtttttagttcggatagaattatttttttttttttcgttttttcgtaagtttttcgtttatgtatagcggatttgagttttgagtttaagtttttttaatgttcgtttggaaagtaaaaggagagagaaagagaaagtcgattttcgttggtttgggatttagggtcgcggttttatttgtcggtatttttcgaaagtcgcgtttttgcgaaatgaaatttcgtttaggaggtcgcggatttggatattcggcgttattttttttatttttgatttaggttttttttcggcgttgcgagttttcggggaagggttagagtcggtagttttttttagttcggggaggggagagggttatgcgattttatttttggttagggtcggggaggtttttgtttttcgggagttttgttcgggttttttggtcgtagggttgttgggttttaggtaggaacgagagggtgaggtttatatgtggttcggcggtttagggcggtttgtagcgtttttattgtttcggttgttaggggttgcggcgacgcggttagttagtagcgagtttaggtcgcgtagattttattgatgagttttgatttttagtattttttttaagttaagaagagtttagcgtatttttcggttgttttattttagtttttttgttttagttttttagttttattttttttcgttttgttttggggtgtgtatagtagtttaggttttttttttttttttcggtttcgtggttcgaagtcgtcgagagagttcgggatagcgtaggattaggtagtcgttcgtttttttgttattttaattgtaggtttcgaggggcgtttttggagtgtattgaggtgtgttttaatcgtgcggtatttaataaatggatttttggtgtgtggttagaagagaaaagttatttatttattttttttttcggttttttggtaatagttgaaggggagttgttttcgtggattgagtagatttaggagagggagtcgtggtgcggagatatacgtattatatatagatgatcggtggtatatacgatatacgttgatatatcgatatcgttagtgggatatatatatatatatatatatatatatatatatatatagagagagagagagaattttttttagtattggttattcgtttttttatttaggtttttattttttttttttttttattttttttggtttttttttttttcgggcgttgcgaaaagtagtcgtatttagttaataaatggtacgtgggagaagttggtgagtgtttggtgaggattttttagggttttttataagaattttttgtatataaagtaagtggcgtgtttattcgggtttttttagttagagttgtgtttttgtttcgttgcgtatcgcggttttcgaaaggagaaaggagagaagaaagggcggggagagcggggtggaggatttggataggttttggaggtttgggttggggaggtttttggtttcgtttagttttcggttcggtaattttttttcggtttaggtttcgtcgcggttttcgtagttggaatggagttgttaggatttagtgacgttttcgttttttttttttttttttaaggggttaggtgggttggggtgcggtcgtcgttgtgttttgtgttttggggtttcggttgggatggggtgggggcgggcgggggcggggcggtaggttacgttgttttggagttggtaagaaaggatagtatagaaatttgtatttttcgaggattgggagtttcgagtttagtttagggggagtgggggcgcgatttttaatttagaaatttttatttgatcgtttaagttcgcggtagtagggcgggtcgcgtcgaatttcggcgtgcgcggagcggggagatgtaggcgagcgttagagttcgggttcgggggttttgcgtcggggagaggagtcgggatttatcggcggagtcgaaaataagtgtatttatatttaaataaacggattaattgtattaggcggggagagggagtatttaatcggttggcgcgaggtttcggcgttgttttgtataaagtaatattttgtgtgagagcgagcggtgtatttgtatgttgcggagtgattagtgggtttgaaaagggaatcgtggttcggttttatttttcgttttggtttaggcgtaggaggaagtgttttgttggaggatgatgatagaggttaggtttcgttaatgggttagtgaggagcggtggaggcgaggtcgggcgtcggtatatatatattaatatatttgagttattattaattagtataggtgtgttggttgtagttattttttttatttatattttttattttttattttttagtcgttgatagtttattttattgttaatttttgttttttttttagg

SEQ ID NO: 147 - DNA, 5203 bp, Artificial Sequence
  chemically treated genomic DNA (Homo sapiens)
tttgggaaggagatagagattgataataaaatgggttgttagcggttggagagtgagagataaagagtgtgggtgagggaagtggttgtagttagtatatttatgttgattggtgatggtttaagtgtgttaatgtgtgtgtgtcggcgttcggtttcgtttttatcgttttttattggtttattagcgaagtttgatttttgttattattttttagtaaaatatttttttttgcgtttgaattagagcgggaaatgaggtcgagttacggttttttttttaaatttattaattatttcgtaatatgtaaatgtatcgttcgtttttatataaaatattgttttatgtaaagtagcgtcggggtttcgcgttagtcgattggatgtttttttttttcgtttggtgtaattggttcgtttgtttgaatatgaatatatttgttttcggtttcgtcggtgggtttcggttttttttttcggcgtagggttttcgagttcgggttttggcgttcgtttgtattttttcgtttcgcgtacgtcgagattcggcgcggttcgttttgttgtcgcgaatttgagcggttaagtgaaggtttttgggttgggggtcgcgtttttattttttttaagttggattcgggatttttagttttcggagggtgtaagtttttgtgttgtttttttttgttaattttaggatagcgtggtttgtcgtttcgttttcgttcgtttttattttattttagtcggggttttaagatatagagtatagcggcggtcgtattttagtttatttggttttttggaagaagaggaaaggggcgggagcgttattgggttttggtagttttattttagttgcggaggtcgcggcgaagtttaggtcgagaggaggttgtcgggtcgagaattaaacgaggttagaggtttttttagtttaagtttttagggtttgtttaaattttttatttcgtttttttcgtttttttttttttttttttttttttcggaagtcgcggtgcgtagcggagtagaggtatagttttggttggagaggttcgagtaaatacgttatttattttgtgtatagagggtttttgtgaaaagttttgaagagtttttattaaatatttattaattttttttacgtgttatttgttgattaagtgcggttgtttttcgtagcgttcgagaggaggggaagttaggggagataagaggggagggggagtggaagtttgggtgggggggcggatgattaatgttgggagggattttttttttttttttgtgtgtgtgtgtgtgtgtgtgtgtgtgtgtgtgtgtgttttattggcgatgtcggtatgttagcgtgtgtcgtgtgtgttatcggttatttgtgtgtggtgcgtgtgttttcgtattacgatttttttttttgggtttgtttagtttacggaggtagtttttttttagttgttgttagaaaatcggggaggaaagtaagtaaatggttttttttttttgattatatattagaagtttatttgttgaatgtcgtacgattaggatatattttagtatattttaaaggcgtttttcggagtttgtagttaaggtgataggagagcgagcggttgtttggttttgcgttgtttcgagttttttcggcggtttcgggttacggagtcgggaaggagaaggaaggtttgggttgttgtatatattttaggatagggcgagggggaatagggttgaagagttgaggtagggaggttgaaatgaagtagtcgaagggtacgttagattttttttgatttagggaaagtgttgaaagttagagtttattaataaaatttgcgcgatttgaattcgttgttgattggtcgcgtcgtcgtagtttttggtagtcgggatagtgaggacgttgtaagtcgttttgggtcgtcgggttatatgtgggttttattttttcgtttttgtttgggatttagtagttttgcgattaaggagttcgggtagggttttcgggaagtaaaggttttttcggttttagttagaggtggggtcgtataattttttttttttttcgggttggggagggttgtcggttttaattttttttcgggagttcgtagcgtcgggaggaaatttgggttagaggtgaaggaggtggcgtcgggtgtttaggttcgcggttttttgggcgaggttttatttcgtaggagcgcgattttcggaggatgtcggtaagtggggtcgcggttttgagttttagattagcgaaagtcggttttttttttttttttttttttattttttaagcgagtattaaagaagtttggatttaagatttaagttcgttgtgtatgagcgagggatttgcgggggggcgggggggggggaagtgattttgttcgaattggaggcgagtattatttttataattttttaattagcgatcgagtggattagtatttttttaagttttgtttcggaaagaagtagtcgtaattttgttgttatttttttttagggtattggttttttgaattagtttttttttttatttttttaatttttatttcgttgcggagaaaagttttaataaaaaattagaaaaggtaaggagcgaggagtgaatgttattgacgttattgggtggggaagggggtttcgggaaagatttttggaaattttttcgtataaataaaaaataaaaaggatttggttgttttttatgtgttaatatttggggaggggagtttaattttagaatgaggtcgagtttttaaagtttaaggagagaggggtgagagtgagattttttcgttttttttggattggttttaaggaaggtgggggtgttgttttatttcgtggggagttttattttttttgttaagtatcggttttgggggcgaagcggtttaggggtgtgggggtcgagattgaggtgcgggcgcggttgttagaggtgtgtataaaatcgagataattcgtaggtcgttattttaattgcggttattaatacgttcgaggtttatttgttgttttttaagacgcgggggggcggcggggattgcgttttaggttttgtttttttttttcgtttttttataggtttttgtttttttttatttttcgttttttgtggttagagggaggattttttaggtcggcgggtgcgttttcgcgggggtcgtcggggtcgttttattcggtagcggggttgtttgcgtggagggagtttcgttgggggatcgtggttcgttagagtttgtttagagtttttagttagtattgatgcgttaatatgaggtgaggtaagtattttattcgtatcgatttttggtatttttttgtgtttattttattaggttttcggggaggtaaagaagtgtttatttttggggggaagtgtttttagtttttagttttagaattaagagttttttattcggagttttgatagttttgatatttttaaatttttttttttttcggttaagtagaggcgtagcgtcggcgcgttggaaagggtgaagattggtattttttggagaaggaaagttttggtagatatttgcgttattttgtagtgttttaaacgtttttttttttgtagattttgggaaggtgggattttttgttcgcggagttggtaaacgggtttagtgagttttaaaggtaaaggtttttatttcggtcgtttagtttttggtgttttttttatttttaggtttttgttttttttttttttttagtaatttgtcggttttcgttaattcggtagtttcgtcgagtttagagtttagaaaagttaagaagattttagagtcgtttcgtggtatttttaggttgtggttattgttcggtttggggggaagtcgcggtgttttcgttttttttcgttttttgttaaatggttagtgttaggggttttttgggtttagtttttagttttttttcgttcgttttgggaggttagtttgtttttttttttttttttttttttttttttttttttttttttttttttttgttttttttttgtttatttttaaaatatttttaaaataatattgtttagtggagttttttagtaaagggatttttagtagtttagcgggttagatttttaaggttttgttttttagtttttttatgttgttgtttagataggagttaggtttaaaatttttgatatgtaggataattgaaattagcggtatttttcgatttttgtaaatagggtttttagaaaagtttgttttttattttattattttgtgacgatttttttattttttttttttttgtaatttttgtttttaagaggtaagagtttagttttaaaggaaaagtaagtaagttaaggttattttagttttttttttttggatattttttttttaaatcgttgtttattttaaaggttaacgattcggttttgcgatttgtttcgttgtagatttgggaataggtaggcgggaattgggggttttattgggggatttgaggttggggagggggagggagtaaatgttatggttggttcgtttaagtatttagggaatcgaagttaagcgtattttgacgggtttttaaaatgatattgattaggataagttgtttttaattttagtaagagttaatttgtttgttaattaaggtattaaggggtttaatgcgagttttattagcgataggagaatagaggcggtagttagggattaaaagtcgggattttatatatttgttagcgttatttttaaaaaaaaaaaaaaaagtatttttaatttgaaaataattcggcgtttttcgttattttttaatttagttttatagagggtgatttttaaatttggttagcggggaaaatcgttgttcgggggatagaggggttgataggaattgcgggttggtttagtcgaatgcggtcggggagaatttaagaatttttagttcgcgcggttcgatgtttttgattttttacgagaggaaagggaatgaaaaatgaagtaataaatgatattatttaggttggtagttttcgttttcggttagatttcgttttttaggttcggttttggcgtcgggtggcgtttagtttttgtacgcgcggcgcggttcgcgggaaagtttgtgtagcgagagtgattgttttttcgtttcgcgcgcgttgtttttttttgtttcggaggggcgttgggtttttt

SEQ ID NO: 148 - DNA, 8085 bp, Artificial Sequence
  chemically treated genomic DNA (Homo sapiens)
  unsure (2545): unknown base
gttttatgatttaattattttttaatatttttttttattaagattattatattggtgattgggttttgatatatagatttggggagaatataaatatttatattatagtatttattaatttatttagttattttattgttaggtatttatttagaaaaaatgaaaatatatgtttatataaagatttgtataatatttttatagtagttttatttataatattaaaaaaattggaaataatttagatatttatttatagttaaatggataaataaattatagtatataaataaaaagaataaaaagaattaattattgatatatattataatttagttgaattttaaaataattatgttgagtgagagaaattaaatgaaaaaaagatatattatattatatataattttaagaaataaaatttaatttatttggtatttagatttttatttttatattagttttaaataaaaagttttaaatttttttggataaatggttgattttacgattggggtaggaaatatataagatgagtttgatgagtttgtagtattttgtaatattagaaagtaggaaagtttatatatatatatatatatatataatatagagagtgggttaaggagtataagagttaattgaaaaagtttttagtgttaaaaattggaaaaatttgagtaataaagtatttatgaatttatataaagaaaagattgaataaagaagtaaatgggggagaagaagtaaattttttttatagaattttaaataaattatgtagatattttattttaaaggagggttagtataattttttatttttttatatttttttaagtgatttataatgatttttttttaaagagtatagagtatgtaaagagggaaaaaagagtaattatgtaatggagaaatttgataaatattattttagttaggtgatggagaataatattaatagttataagttatgttgataatatgtattttttatatgatgtaataaatatagtatattatttttttgatttttatttcgttaaaatttaaaattttagtttatttatgaggatatattaaattttaatagaagggtattttgtaatatattttattagtatttttaaggattgttaaggttattaaatataaggaaaatttgagaaatttttatagttaagaggagtataagatattataataattaaatgtggtgttttggatggaattttggaaaggaaaaaggatattaagtgaaaatgaagaaaatttaaataaattatgaatattagttaataataatttattagtattagtttattaattgtaataaatgtattttattaatttaaaatgttaatagagaaaattgtataaatgatatatgagtattttttatattatttgtttaatttttttgtaaatttaaaatcgttttttaaaagtaaaatttattaataaaatatttaaagtaaatagatttaaaaggtatatgtaaatgtataatttaatgtttaataaattagatataaatatttttaaaaatttaatatttggtgatagaaagtagattagtggtttgttagaaagtggtgattagtattaggggaaggggatgggatagaatagtatgaagggatttaaaaaatggtatgaggaaatttttggaggtaaagggtatgtttattattttagttttataggtttaataataaattatataatttaaatatatgtagtttattatatgataattatattttgataaagtggtttttttttttaaattatagaaaaaatatttttatatttaaatttttttttttaaaaatagtttttaggaatatttgaagttagttttattatatttgaatttaattagtgaattttgtttatttaaagatttatatatttgggaagtttttgtgttaaaaatgttaattatttagtattaaaatttatggaataatggtgatttaggatatgttggatatttttattgttgtttttttattttaagatttttaattttttggaaataatttttttagatattttgataagggaattattataattaattaaaattaagttaaatatagtttgttagatttaaaatgaggttaagtgttaattttatagtagcgatcggaaaattaaattatatggtatttgatatttaaaattatatttttaagaaggttgttatttgatgttttgggtttgggttatagtatttaattttataatattgggtaattttgtgttttagtttttttaattatgaaattgggataatagtatttattttgtgagattgttgaaggattatagttaatataggtaaaaggtttataagattatttggtaatgttgttttgattttataaattttatatattgtgtggtattagttattaggaaaatataaataaattagtgagatattattttatatatttggggggttataataaaaaagatagataaaaaatgttgttaaagatgtgaagaaattaggatttttatttattgttggtgnaaatgtaagaagtataattatttgaattatagtttggtagttattttaaagattatatttagagttgttatatgaattagtaattttatttttatgtatatatttaggagaaaggaaaatatacgttgtataaaaatttgtatatgaatgtttattagtaggattttttatggtagttaaaaggtgtaaataatttaaatgtttaataattgatagagatggataaataaaatgtggtttatttatataatgaaatattatttgttaataaaaaggagtgaaggagtgaagtattgatttatgtggaatatggatgaattttgatttaaaatagttaaattataggtataaaaagtatattagtggttgttgggagatttaggcggaaatgtggaataattgttagtgggtattgagattttagagttatatttatgttataaaattaatagtgttgatggttgtataattttgagtatatgaaaaattaatgaattgatattttgagtgagttgtatgatattggaattatattttaataaagtatggtaattgttttaagataggttggaaagagaaagtttgaaaataataataatgatattaataaattagtttatttttttagttttatatatttttgtgtttatatttgtttttgttttatttataatggtttttttgtagttgttatattatattttgttatttgatgttcggtgaatattttatatttgttttttagaattttttttattttttttttatttgtttaatttttatatatttaaaattaattagagtaaattatttattagaataattaattttaaattttagtaatttaatatgataaaggtttgttttttatttatatagtttttttttagatgatcgaggggtttaggttttttatttttagtggtttttttattttttggagttttttgtattttttatatatggttgagataaattatgagttattagtatagttagattttgaggttttataagaaaatttgtaaattatttattttgttttgaataaggtatatttaagatgatgttaaaatatttaatggttttgggttaaatatagtttatgattgtgtatttaaaatatatattgtaatatttttttttttttttattgattttatgaatttagcggggatttattttataagtttaaagataattattttttagattaagaatatttagggtaaaaagtattgtttaatatttttattgaggatgttatgatgtagtatattgtataagttggagttaaaggaaattttttttaaagtgttatttattaaaaattggaatatattttttaagataaatcgaagtgtggtatataatatttaaatttttattatagatatagaggtgttattattttttatttttaaatttttttgttacgttgaggatatttaagaggagtaggatatgttggtcgtagtaggagaaatttgaaagtatttatttttatggaatttataagggagagaattttttattttagtatcgtttttgatatatttattattttaaaagataatgtagttaaatgtttttttttgtgttaaatttttataaaattgaaattttaaaatggtgataaaaattttatttttgatagaatttatttatttttttaattagatagggtataatttttaatttgtaaaataaaacgtaatatgtttatgaggttttattttaaagaatttgttattgagagtagtatttagaataacgggtggaaatgttaattttagagttttagattttatcggtaattggggtagggaggggttttgggcggggtttttttagaggaggaggcgttgttagaaagttgtttggttagtttatagttgttattaatcggggtaagttttgttgtatttgtgcgtgtgggtggtatttttaatgagaattagttttatttgttatttgagtgaaatttataattcgaggcggttagtgttttcgtattattgggatttgagattttcggagatgattgtcgttcgtagtacggagttagtagaagttcgattttttttgggaatgggttgtatcgagaggttcgattagttttagggttttagtgagggggtagtggaatttagcgagggattgagagttttatagtatgtacgagtttgatgttagagaaaaagtcgggagataaaggagtcgcgtgttattaaattgtcgtcgtagtcgtagttatttaagtgtcggatttgtgagtattttgcgtttttagttttcggatagaagttggagaatttttttggagaatttttcgagttaggagacgagattttttaataattattatttttttttgcgttttttatttgtcgttcgttgggataaacgatagttatagtttttttgacgataggatggaggttaagggtaggagttgattagcgtcgttttttttcgttttcgatttaggaggtggagattttttcggtttagttatatttaatatttatttttttttttttttgtttttatattttcgaaatttttttttttttttttttttttttttttttggagacgggggaggagaaaaggggagtttagtcgttatgattgagttgaaggtaaagggttttcgggttttttacgtggcgggcggttcgttttttttcgaggtcggatttttattgttgtgtcgtttagtcgtaggttcgttttcggggagttagatttcggatattttgtttgaagtttcggttatatttatttttttggacgggttatttttttttcggttttgttagggataggattttttcgacgaaaagacgtaggattagtagtcgttgtcggacgtggagggcgtatattttagagttgaagttataaggggtgttggaggtagtagttttagttttttagaaaaggatagcggattgttggatagtgttttggatattttgttggcgtttttaggtttcgggtagagttaatttagttttttcgtttgcgaggttattagtttttggtgtttgtttggtttcgaatttttcgaagatttatcggttgttttcgttatttagcgggtgttgttttcgtttatgagtcggttcgggtgtaaggttggagatagtttcgggacggtagttgtttataaagtgttgtttcggggtttgttattagttcggtagttgttgttttcggtttttgagagtttttattggttcggggttttagtgaagtcgttttcgtaggtcgttgcggtggaggttgaggaggaggatggttttgagttcgaggagtttgcgggttcgtttttgaagggtaaatttcgggttttgggtggcgcggcggttggaggaggagtcgcggttgtttcgtcggggcggtagtaggaggcgtcgttttggtttttaaggaagattttcgttttttagcgtttagggtcgttttggtggagtaggacgcgtcgatcgttcgggacgttttcgttggttattacggtgatggattttatttacgtgtttattttgttttttaattacgttttattggtagttcgtattcggtagttgttggaagacgaaagttacgacggcggggtcggggttgttagcgtttttgtttcgtcgcggagtttattttgtgtttcgtttatttcggtcgttgtaggcgattttttcgattgcgcgtattcgttcgacgtcgagtttaaggacgacgcgtattttttttatagcgatttttagtcgttcgttttaaagataaaggaggaggaggaaggcgcggaggttttcgcgcgtttttcgcgtttttattttgtggtcggtgttaatttcgtagttttttcggatttttcgttggggttatcgttttcgttgtcgtcgcgagcgattttatttagattcggggaagcggcggtgacggtcgtattcgttagtgttttagtttcgtttgcgtttttttcggggtcgattttggagtgtattttgtataaagcggagggcgcgtcgttttagtagggttcgttcgcgtcgtcgttttgtaaggcgtcgggcgcgagcggttgtttgttttcgcgggacggtttgttttttattttcgtttttgtcgtcgtcgtcggggcggttttcgcgttttattttgtattcggttttaacgggttttcgtagttcggttattaggtcgtcgtgtttaaggagggtttgtcgtaggtttattcgttttattttaattatttgaggtgagggttcgggacggggtacgtttagcgcgttcgggagtagcggtttcgttggcggcggcggtcgttaatttttagttttagttttagcgtatcgttgcgtttttcggggcggtcggagagggtgggtagcgggatatagtataggggtagttgtttttttttttttttttttttttttttatttttggggatacgaaggtgggcgtagaatatattatttttggggcgtgtttttttgaaagttgtttttttgtttgttttttaatttttcgaattttttagatttcgaagtagaattaatttcgatttaaaacgtgtagcgttatattaggttcgttgtagtttagtggggtagaaagtgcgcggcgagttgggggttttatgaaatgttttttttttagaagaaggacgtttattaggagtgtttgttttggagaggagttaaggtatcgttttttcgggaggggtgggatttgagaggtggtcggttagaatcgaaagtagtattattttagggatttgaatattttagtggtttagtttttttaagaattttaagattaaaattaagtttacgtgggaaatgtttaaattgtggatttaaacgtttgttattgtattgtatcgtttttttattattgtttgttatttattataattttttttatatataggtttaaaaaatattattttgtatattgaagtaatggaatgtaaaaaaagaatgttttgtttggaattttatgttgtgaataggtaaaatagtgttagtgtattggataatattttaaaatgataaatatatatttgtttaagtaagtaatgattatagggttgtgttttaaaaatttaaaattaaaatattgtaaagtattatcgaatttttaaagttaaattatatttgttttgatttagtatatagataggaaggatataatattttatttgttaaagattaaattgtttttatataaagagttttgtagaaagatttttttttaatcgattttaattttttaggatataatattatatattaattattgtttttttatattggtgttattgatgaatggttaattatttgtaagtatggtgaatttagttacggatagtttattattaagtttagtttgtatgttttttaagtgtatatatatagttttgtttttaaaatttttttttattttgttaatattggtttaagaaatttttagtattagatagtggtgtatttaaaaataaatggagtattttgttttgtattttaagg

SEQ ID NO: 149 - DNA, 8085 bp, Artificial Sequence
  chemically treated genomic DNA (Homo sapiens)
  unsure (5541): unknown base
ttttgaaatgtaaaataaagtattttatttatttttaagtgtattattatttaatattaaaggttttttaaattagtattaatagggtgaaaggagattttaaaaatagaattgtatatatatatttgaaagatatgtaaattaaatttggtaatagattattcgtaattggatttattatatttgtaaatgattagttatttattagtagtattaatataaaagaataataattagtgtataatattatgttttagaaagttaaagtcggttaaaaggaaatttttttataaaattttttatatagaaataatttagtttttgataaatgaaatgttatgttttttttgtttgtatgttgggttaaaataaatatggtttggttttaaaagttcgatggtattttgtaatgttttggttttgagtttttaaaatataattttgtaattattgtttatttaagtaagtatatgtttgttattttaaagtattgtttaatatattgatattgttttgtttatttataatataagattttaaatagagtattttttttttatattttattattttagtatgtaaagtagtgttttttaaatttgtatataaaaaaaattgtagtgaatagtaagtaataataagaaaacggtgtaatgtagtgataggcgtttaaatttatagtttaaatattttttacgtgaatttaattttaattttgagatttttaagaaaattgagttattgaagtgtttaaatttttaagatggtgttgttttcggttttggtcggttattttttaagttttatttttttcgggggaacggtgttttaatttttttttaagataagtatttttggtaaacgttttttttttaagaaagaagtattttataaagtttttaattcgtcgcgtattttttgttttattgggttatagcggatttagtgtgacgttgtacgttttaaatcggggttggttttgtttcggaatttggaagattcggaaagttaaaaaataaataaaaaaatagtttttagggaggtacgttttaaaaatagtatattttgcgtttattttcgtgtttttaagagtgaggagaggagggaagaagaagggaggtaattgtttttgtgttgtgtttcgttgtttatttttttcggtcgtttcggggagcgtagcggtgcgttggggttggggttgagggttggcggtcgtcgtcgttaacggaatcgttattttcggacgcgttgggcgtgtttcgtttcgggtttttattttaggtagttgagatagggcgggtagatttgcggtaggttttttttgagtacggcggtttggtagtcgagttgcgggagttcgttgaggtcgagtgtagggtagagcgcgggggtcgtttcggcggcggcggtagaggcggaggtggagggtaggtcgtttcgcgggagtaggtagtcgttcgcgttcggcgttttgtagggcggcggcgcgaacgggttttgttggggcggcgcgtttttcgttttgtataggatgtattttagggtcgatttcgaggaggacgtagacgagattgaggtattggcgggtgcggtcgttatcgtcgttttttcgggtttggatggggtcgttcgcggcggtagcgggggcggtggttttaacgggaaattcgggaaggttgcggggttggtatcggttataaggtaggaacgcggggagcgcgcggaggttttcgcgttttttttttttttttttatttttagagcgggcggttggaagtcgttatagagagggtacgcgtcgtttttgggttcggcgtcgggcgggtacgcgtagtcggggaagtcgtttatagcgatcggggtggacgaggtatagggtgaatttcgcggcggggtaaaggcgttggtagtttcggtttcgtcgtcgtaattttcgttttttagtagttgtcgagtgcgggttgttaataaggcgtgattgagaggtaggataggtacgtggatgaaatttattatcgtggtggttagcggggacgtttcggacgatcggcgcgttttgttttattagggcgattttgggcgttgagaagcgggaattttttttggggattagggcgacgttttttgttgtcgtttcggcgggatagtcgcggttttttttttagtcgtcgcgttatttagagttcgaggtttgttttttagaagcggattcgtagatttttcggatttagagttatttttttttttaatttttatcgtagcggtttgcggagacggttttattggggtttcggattagtgagggtttttagaggtcgggagtagtagttgtcgggttggtgataggtttcggggtagtattttatgggtagttgtcgtttcggagttgtttttaattttgtattcggatcggtttatgagcggggataatattcgttgggtggcgggggtagtcggtggattttcgggaagttcggggttaaataggtattaagagttggtgatttcgtaggcgggagggttgggttggttttgttcgggatttgagggcgttaatagagtgtttaagatattgtttagtagttcgttgtttttttttgggggattagaattgttgtttttagtattttttgtagttttagttttggaatatgcgttttttacgttcgatagcgattgttggttttgcgttttttcgtcggaggggttttgtttttggtagggtcgagggaagagtagttcgtttagggagataggtatggtcgaaattttaggtaaggtgttcgaggtttggtttttcgggaacggatttgcggttgggcgatatagtagtggggattcgatttcgggggagggcgggtcgttcgttacgtggggagttcggggattttttgtttttagtttagttatgacgattggatttttttttttttttttttcgtttttagggaggagggaaaagggaaggaggagggggtttcgggaatataggggtagagggaggagaaagtgggtgttgaatgtggttggatcggagggatttttattttttgggtcgggggcgggggagggcggcgttggttagtttttgtttttggtttttattttgtcgttaggggaattgtggttgtcgtttgttttagcgagcggtaagtggggagcgtaagaaaaagtagtaattgttaggagatttcgttttttaattcggggagttttttaagagagttttttaatttttgttcgaggattggagacgtagagtatttataagttcggtatttgagtggttgcggttgcgacggtaatttagtgatacgcggtttttttatttttcgattttttttttggtattaaattcgtgtatgttgtgaagtttttagtttttcgttgagttttattgtttttttattaaaattttggggttagtcggatttttcggtatagtttatttttaggaagggtcggatttttgttggtttcgtattgcgggcgatagttattttcgaagattttagattttagtagtgcgggagtattagtcgtttcgggttgtagattttatttaaatgataagtgaagttagtttttattgagaatgttatttatacgtataaatataataaggtttatttcgattagtgatagttgtggattggttagatagttttttaataacgtttttttttttagggaggtttcgtttaaagtttttttttattttaattatcggtaggatttgaaattttggagttggtatttttattcgttattttgaatgttatttttaatagtaggttttttgggatggaattttataagtatattacgttttgttttgtaaattaagaattatgttttatttaattggaaaaatgaatagattttattagaagtagaatttttgttattattttaagattttagttttgtaaagatttaatatagaggaagatatttggttatattattttttaaaataataaatgtattaaggacgatattaaaataagaaatttttttttttatgagttttataaaagtgaatgtttttaagttttttttgttgcgattaatatgttttgttttttttgagtatttttagcgtgataaagaaatttgggagtgggagatggtaatatttttgtatttatgatggaagtttggatgttgtgtgttatatttcgatttgttttaaggaatgtgttttaatttttagtaaatagtattttaaggaaagttttttttagttttagtttatatagtgtgttatattataatatttttagtagagatgttgaatagtattttttattttaaatatttttagtttgaaaagtaattatttttgagtttataaaatggattttcgttaaatttatgaagttagtagaaaaagggaagaatattgtaatatatattttagatatatagttataaattgtatttgatttaagattattgggtattttaatattattttaaatatattttgtttaaaatagagtgaatgatttgtaaatttttttgtaggattttaaggtttagttgtgttaatgatttatagtttattttaattatgtataaagaatgtagaagattttagaaggtgggggagttattagaggtaaggagtttggatttttcgattatttggggaggggttatatgagtgagaaataaatttttattatgttaggttattaggatttggagttggttgttttagtaaatagtttattttgattaattttagatatgtggaagttaggtagatagaggaaaggtaaagagaattttgggaagtaggtatagaatgtttatcgggtattaaatggtaggatataatatggtaattgtaaggggattattatgaatagaataggagtaagtgtgggtatagaagtatatgagattagagaagtaaattaatttattaatattattattgttgtttttaggttttttttttttagtttattttaaaatagttattatgttttattgaggtgtaattttagtattatatagtttatttaaagtattagtttattgattttttatgtatttagagttgtgtaattattagtattattaattttgtaatatgagtatgattttaaaattttaatatttattagtagttattttatattttcgtttaaattttttagtagttattaatatgttttttgtatttgtgatttggttattttggattaaggtttatttatgttttatatgaattagtattttatttttttatttttttttattgataaataatattttattgtatggataaattatattttatttatttatttttattagttgttggatatttgggttgtttatattttttggttattatgaaaaattttgttaatgaatatttatgtataagtttttgtgtagcgtatattttttttttttttggatatatgtataggagtggaattgttggtttatatggtaattttaggtgtggtttttggagtaattgttagattatggtttaaatgattgtattttttatatttntattagtagtgaataagggttttagtttttttatatttttgataatattttttatttgttttttttgttatagttttttaagtgtgtgaagtggtattttattgatttatttatatttttttgatggttaatgttatatagtgtatagaatttgtaaaattaggatagtattgttaggtagttttgtaagttttttatttgtgttaattgtaattttttaatagttttataaaataggtattgttattttaattttatagttgggaaaattgaggtataaggttatttagtattataaagttaagtattgtaatttaaatttaagatattaaatgatagtttttttaggagtgtgattttaaatgttagatgttatataatttgatttttcggtcgttgttgtaaaattggtatttggttttattttaaatttgataaattatatttggtttgattttggttggttataataatttttttgttagaatgtttggggaggttgtttttaaaagattgaaaattttgaagtgggaaaataataataaagatgtttagtatgttttaaattattattattttataaattttgatgttgggtgattagtatttttggtataggaattttttaaatgtatgaatttttgaatgaataaaatttattgattaaatttaggtgtgatggggttaattttaaatatttttgaagattgtttttggagaagaggatttaaatgtggaagtattttttttatagtttggggaaaaaaattattttattaagatatagttgttatataataagttgtatatatttaaattgtataatttgttgttagatttgtgaaattaaaatgataaatatattttttgtttttaaaagtttttttatgttattttttaaatttttttatattgttttgttttattttttttttttagtattaattattattttttggtaagttattaatttgttttttgttattaaatattaggtttttaaaaatatttatatttgatttattaaatattaaattatatatttgtatatgttttttaggtttgtttgttttagatgttttattaatagattttatttttgggaaacgattttggatttatagaaaaattgagtagataatatagagaatgtttatatattatttgtataattttttttgttagtattttaaattaatagggtatatttgttataattaatgaattaatattgataaattgttattaattaatatttatagtttatttagattttttttatttttatttaatgtttttttttttttttaggattttatttaggatattatatttaattgttatgatgttttgtgttttttttggttgtgagagttttttagattttttttgtatttgatgattttgatagtttttaggagtattggtgaggtatattgtaagatgtttttttattgggatttgatgtatttttatgagtagattagggttttgggttttggcggggtggaaattaaagaggtaatgtattgtatttattatattatatgaagggtatatattgttaatatgatttatgattgttaatgttgttttttattatttggttgaagtagtgtttgttaggtttttttattgtatagttatttttttttttttttttgtatattttgtattttttggaaggaaattattatgagttatttaaggaagtgtgggggagtagggagttatgttagtttttttttggagtggagtatttatataatttatttggaattttgtgaggaagatttgtttttttttttttatttatttttttatttagttttttttttgtatggatttatgaatattttgttgtttaaatttttttagtttttggtattgggggtttttttagttgatttttgtgttttttgatttattttttgtattgtgtgtatgtgtgtgtatgtgtggatttttttattttttggtattataagatgttatagatttattagatttattttgtatattttttgttttagtcgtagaattagttatttatttaaggaagtttgagattttttatttgaaattggtatagaaatgaagatttgggtgttaaataaattaggttttattttttagaattgtatataatatagtgtattttttttttatttggttttttttatttagtataattattttgagatttagttaaattatagtatgtattaatagttaattttttttattttttttatttatatattatagtttgtttatttatttaattgtggataaatatttgagttgtttttaatttttttggtattataaatagagttattatgaaaatgttgtataagtttttgtatgaatatgtgtttttattttttttgggtaaatatttagtagtgaaatggttggataaattagtaggtgttgtgatatgagtgtttgtgttttttttaaatttgtgtgttaaaatttaattattaatgtgatagttttagtaggaggaggtgttggggagtgattaggttatggagt

SEQ ID NO: 150 - DNA, 7110 bp, Artificial Sequence
  chemically treated genomic DNA (Homo sapiens)
tgttttttgtgatgttttagaggttagaaggatgttttgaaggggaaaattgtaggagttaggtagagtagggttttggtttttttttaatgtttttttatttagataaattcgggttattttgtagaggttgtagtgagttatgattacgttattgtattttagtttgaggaatagagggagatttcgttttaaaaaaaaaaaaaaaaaaaaaaaaaaaaaaaaaaaaaatttcggtttattttatgaagtatttggtaggtgttttaatattttttggtatatgggaattatttttttttattattggaaggtttaaaaagtaaataatgtgttttatatggttagagttagtattaaggggattaagtagaataattggtagttagtgttagtttggagattaatatagttaaagttgttttgttatgttatgttttttttatttgtattgttttacggtttaagataaaatttttgaacgttatttggatatagtgagtatttggtttgttttattgtttttaggagtaattaatttaatttttatttttttgagaatgatgattttatatagtatatttttttattaagatgtgaaagatgatattatggtatttgaaatagttttaggagagatttgggatatgggaagtttgtagataataatggaaaatttttttttagaatatagttatttgtatgatttatagtagcgttttttggagaatgttttaaaattatttttattgaaagaataataatgtttgttattaggataaatgaaataaggggaaaattttagatttttggaataatgggtttatatttaatttaatgattattatgtttttatattttgtattatttagaaaatagtagttaaatagatagaaatatagaagattgtttaaaaattaaagttattgagttagatttttttttgaaaggttagcgtatgggagatgagaaaggtattatagagattagagtgtttatataaaagatattttagtagatgatttataaagagtatattaagtatttatattatttatattaagttgttggttatttcgtttattaaagaaaataagaaagaaattttttttcgatattattttggtgtagtaataatagagttttggaattagttgttagaagcgataattaaagttagtttattatgtttattaattaatttatatagttattttgaagttttatataattgtttttttgttataagtttttatttttttttatggtattttggttttgaatttagataggtaaagaattaagtatggtcgggcgcggtggtttacgtttgtaattttagtattttgggaggtcgtggcgggtagattacgaggttaggagatcgagattattttgattaatatggtgaaattttgtttttattaaattataaaaaattagttcggtatgatggtgtgcgtttgtagttttagttattcgggaggttgaggtaggggaattgtttgaatttgggaggtagaggttgtagtgaatcgagattatgttattgtattttagtttgtgagatttcgttttaaaaaaaaaaaaaaaaaaagaaaaaaaaaaaaagaattgaagtgtttggagattagtgtattgtaatatttatatagttaagtaggtatttttaattgaattttaaaaaagtattatttttgaaattttttttagtttagatagggttagttatttgggtagaaaggaaaagaaaaataaaaaattggaaaaggatgtattagtattttttttagaaataatttaatattaggaatagaaggaggattttatttattaatttttaataattatttgatgttgttgttgggttggttaaatatttgttaatattgatgatttttttatttattattagagagaagtagagggatttgatgtttagagaagtagtaaaatttattttttattttttttttttagtcggatggaagtatttggaggttggttttatattttagtattttagtgttggtgatgtagattatttttgttttagagtaattttgtgttatggaatttaagaggattttgtcgtattaggataggaatgtatttttgttttatttgtttttatgaaagtagattttagagatttttagatgttatgagattaattgttatttagggtaggttttaggggagggatagagaagggtagtgttaataatagggattttggagataagattagtaatttaagaaataaatgtgagatattttatttttttttaatttattttttttttaaaagtttatttttattttttttttttttattacgtagtaattgataattaaatatagttttggtttttattatgtaatttagtagaatatttagatattaggaattttttatttttggttatttatataataatgaaatttgtagtttacgttaggttgtgtggatagtatttgtatttttggaaattaattggaggttttttttttattttttttcggttgttttttatttttttttttattgtggtttttgttttttttaagttgattagaattatgtataaaattagtttttaataaatattaatattgaagttttagtaggttgttaatttttgtatagttattttaaatgttgtatataagtgtaaagttttatggagttttagaggtttttaagaatattgtaaatattttaggtttaattagtagtttcggagttaggtaatggtttgtggttttttgcgttaggttttttgaggtttttagtttttagaggttgtttgtaattatgatgtgtatatatatagtatttttttttaaatatagtataaattttttttagattttgttaggtatttataattattgaatatatatgtagattgatttttatttttttaaagtttgaaaaataatttagtgttttaatttaggtttcgttagatattttttgatttaaattgtcgtttgtagttttattttttaagggaaatgaaaaaataataaatttttagattggtgttgatgtttattttttttaagcgggtcgattatttgttttgtagatttttgacgggtggggtgcggggtaggagtgcgatttaatttttagtattttcgaattagtttttttacggtgataggttagtttaatcggggttgtaaatagatttgataggtttgttttgggttgacggttattgattaggtttttagattagataagttatttggttgagtttatagtaggtggggcgcgtttattagtttaggggtagtgattggacgtttgttgtaatatcggagaatgtacgttttgggttgtagtaggagatatttttaagtatagaattaaaagggtttattttaagcggtagggtattagcgatggagaggttcgagagttttagcgtttagtttttttttttacgtttgggaaggcgtagaataggtcgatgtagagtaaggagtgagttttaggttttagttttttggtttgtttttagggtagtaggcgaggagtggtattagtttggggatttttttttcgcgttttgtaagaatcggcggtagttagtaggcggggaggcgggggtacgtgtttggatgtgggtgtttgtgtaattagttttttaagcgttagtttcgatagcgttttttcgggaggttggttcgagtttttgttttcgtcgcggcgtaggaagggttggggtttcgttgtttgtattaggtaagagtatttcgagtaaaggaagaagacgatttgttttcggagttattattggggagtgggaatttggaaagttttttaattagggatatacgtgatttttttcggaaagtagtttcgattgtggttcgtgtatttttttatttttttttgaatttttttaggttttttcgtttcgtttattcgttgggttgtagttttttatcgtttcgtattttttatttaattcggtaattttaaacgtgtacggttcggtcggggcgcgcggagtttggtttcgggcgatttattttgtcgggtttttacggcggttaagggggggcggggttaggtggtttttgagaatcgagtttgatttcgacgtcgcgaatcgatttggagttcgaggggaaagatgttcgatttttttgggggtatcggagcgggcgtaggagaggtttgcggggtgcgttttatttatagggatttttttttagtttatttagataggtgttttttgggtttttgaaatttaacggttatgtgtttacgtttagtacgttcggttgagagtttttatttttagggtaaacgagtcgagttatcggggaagcgagaggtggggcgttgtaagggagtcggatgaggtgatatacgttggcgatataatagtaggttgttttttgtgttaagattgatattatgaggatatagatttgggggaagggggaatttttaggtaaaggttgttatagttaaatttttgcgaacgattgtgattcgatagcggtgtaaaaggaaagagcgaatgtagtttacgtcgcggaaatttaggggtagaggtaaggggggagggtattttttttgtagggatcgtttttgtatttttttttatattgagtagcgtggttatttggttttttttatttgtgtataggtaattttagattcgagttagtgatattgtttaacgtatttattttagtttttattattagttttttattttcgttttataatagtttattttgttttcggttgggtttttgggtagaggtcgaggtttagttcgttattttcgtttcgcgttgttgtaaaagtcgtagtaagtgtagttgtaggttggcggttgggaatcggttcgagtaagttttaggtagttatattgggtatgtttagtagagtttgcggtttggggattttgcgttcgtatttagagttatcgttttgtttttttttatcgttttttgttttgttttgtttttttttcgttcggcgcggtttcgttcgtttttcgttcgtttttcgttttttttcggtttttcgaggcgttcgggttttcggcgcggcggcggagggggcgggtaggtcggcgggcggtgatgtggcgggattttttatgcgttgcggtaggatacgcgttcggcgttgggacgcgattgcgtttagtttttttttttcggaagttgtagttatgatggaagtttgagagttgagtcgttgtgaggcgaggtcgggtttaggcgagggagatgagagacggcggcggtcgcggttcggagttttttttagcgtttgtgagtagtcgcgggggtagcgttttcggggagtcggtcggtttgcggcggcggtagcggcggcgtttttcgtttttttttcgttttttttaatcgtgtagtttttttttcggttttttttgaaagggaaggtggaagtcgtgggttcgggcgggagtcggttgaggcgcggcggcggcggcggtatttttcgtttttggagcgggggggagaagcggcggcggcggcggtcgcggcggttgtagttttagggagggggtttgagtcgtttgttattatttttagggttgggaacgtcggagagttggtttttttttttttattgtttttaatacggcggcggcggcggcggtatatttagggattcgggtcggttttaaatttttcgttcgtcgtcgtcgtatttttcgtggttcgggtttcggaggtcgtcggcggaggtagtcgttcggaggattattcgttttttttttatttcgttgtcgtcgttgttaggtttttggttgttgaggagaagtaggtttagtcgttgtaattatttagtagtcgtcgtagtagttattattcggttgcggtttagagttaagcggcggtagagcgaggggtattagttatcgttaagtttagagttatttttattttgtagaagaagtttcgttattagtagtttttgttatttttttttttttttttttttagttataggtttttagatatgatagttattattaaagagatcgttagtagaaataaaaggagatattaagaggatggattcgatttagatttgatttgtatttatttttgcggttgtttttttttatttttttgttatttttttagaacgtgggagtagacggatgcgaaaatgttcgtagtttgggtgattataatatttaattttggttaggttgttaggttatatattttgtgttttttttttgtgtatttaatttagggtgtgtttggttagacggaatttttgtttggttgtaagtgttaagttatcgattgtttttttaggttatttatatggtttttttttgagggttattgttcgttaatatagaatatagtatattgttagtggattagcgagttcggtaattcggttttttaaatgaataaaaaagtagacgttttttgaggttgagtatatttcgattaaattttggtttaggttttagattaagggtttagattagaataaaatgaaaattagtgttgtacgtacgtatattgtattagaattttgtagtgattgttttagttttttgagttgtattgatagatttttttaaaatatgattgatttgtataattttagaagtagaattatttttagtatatatggtgtatattgagggtaaaaagtagttttgttaatgtttaaatttaagttatttataattttgaattgtatgtagaagttttgtagtttgaagttaatagtgttataatatattttataaggcgtttttattagatttttgttatatttatttttttttttttttatggggtgatgtaggatagtgtttgaaatttgtattttagtagtatttaatgtttagtgtttttgttataaatatagaatggatattgagtagtttttgattttagatggtaatgtgtaggtttaagggtattgtgtgtagtaagtgaagattgtagaaataaaattttagtttatgtttgaaatttaagtattgttgtgatgttagaattgttgtttatcgtttttaggttttaggttttttgatattttttggtatcgttaattttattgatttg

SEQ ID NO: 151 - DNA, 7110 bp, Artificial Sequence
  chemically treated genomic DNA (Homo sapiens)
taaattagtaaaattaacgatattaaaaggtgttagaggatttgaaatttaaaaacggtgagtagtaattttggtattataataatatttaaattttaagtatgaattgaagttttatttttgtaatttttatttgttatatataatatttttgaatttatatattattatttgggattagaaattatttaatatttattttatgtttatgataagagtattgaatattaaatgttattgaagtgtaaattttaagtattattttatattattttatagggagagaaaaaggtaaatataataaagatttagtaagaacgttttataaggtatattatggtattattgattttaaattataaaatttttatatatagtttaaagttgtaggtaatttaagtttaaatattaataaaattattttttgtttttaatgtgtattatatatattgaaaatgattttgtttttaaagttatgtaaattagttatattttaaaagaatttattaatgtaatttaggaaattaaaataattattgtaagattttgatgtaatatgcgtacgtgtaatattaatttttattttattttgatttaaatttttgatttagggtttaagttaagatttaatcgaaatatgtttaattttaaaaagcgtttatttttttgtttatttaggagatcggattatcgagttcgttaatttattaatagtgtattgtattttgtattaacggataatagtttttaggaagagattatatagatagtttaagaaagtaatcggtggtttgatatttgtaattaggtaagagtttcgtttagttaaatatattttaggttgaatatatagaaaggaaatataaaatatatgatttagtaatttgattagggttaaatgttatagttatttaaattacggatattttcgtattcgtttatttttacgttttaagagagtgatagaaaggtaaagaggagtagtcgtagaaatggatataggttaagtttaagtcgaatttatttttttgatatttttttttgtttttgttaacgatttttttgatgatggttgttatgtttgggagtttgtggttgaagaaaaaggaggagagagatggtagaagttgttggtggcggggttttttttgtaggatggaaatggttttggatttggcggtagttgatgtttttcgttttgtcgtcgtttggttttggatcgtagtcgggtaatggttgttgcggcggttgttggatggttgtagcgattgggtttgtttttttttagtagttagaggtttggtagcggcggtagcggaatggggagaagacgaataatttttcgaacggttgttttcgtcggcggttttcggagttcgggttacggggggtgcggcggcggcggacgggaggtttaaaatcggttcgggtttttggatgtgtcgtcgtcgtcgtcgtcgtgttggaggtagtagaaggggagagattaatttttcggcgtttttagttttggaaatggtgataggcgatttagattttttttttggagttgtagtcgtcgcggtcgtcgtcgtcgtcgtttttttttttcgttttaggagcgggaggtgtcgtcgtcgtcgtcgcgttttagtcggttttcgttcgagtttacggtttttatttttttttttaggagaagtcgaggaagaggttgtacggttagaaaagacgaagaggaggcgagaaacgtcgtcgttgtcgtcgtcgtaggtcggtcggtttttcgagggcgttgttttcgcggttgtttataggcgttgagaggggtttcgggtcgcggtcgtcgtcgttttttatttttttcgtttgagttcggtttcgttttatagcggtttaatttttaaatttttattatggttgtagttttcgagaggagagaattgagcgtagtcgcgttttagcgtcgagcgcgtattttgtcgtagcgtataaagagtttcgttatattatcgttcgtcggtttgttcgtttttttcgtcgtcgcgtcgggagttcgggcgtttcggaagatcgaggggaggcgggaggcgagcgagaggcggacgggatcgcgtcgggcgaggggagggtagggtagggtagggggcggtaggagggggtagagcggtagttttgggtgcgagcgtagagtttttaagtcgtaggttttattgagtatgtttagtgtagttgtttggggtttgttcgggtcggtttttagtcgttagtttgtagttgtatttgttgcggtttttgtagtaacgcgaggcgaggataacgagttaagtttcggtttttgtttagaaatttagtcggaggtagggtaggttgttgtggggcgggggtggaggattgatgatgaaagttgagatgggtgcgttgagtagtgttattgattcgagtttgaggttatttgtgtataggtgaaaaggattaggtgattacgttgtttagtgtagagggaaatgtagggacggtttttgtaaggggaatattttttttttttgtttttatttttagattttcgcggcgtggattgtattcgttttttttttttgtatcgttgtcggattataatcgttcgtagagatttgattgtaatagtttttgtttagagattttttttttttttaaatttgtgtttttatggtgttagttttagtataaagagtaatttgttattgtgtcgttagcgtgtattattttattcggtttttttgtagcgttttatttttcgttttttcggtaattcggttcgtttgttttaaaaatgaaagtttttagtcgagcgtgttgaacgtgaatatatagtcgttgaattttaagggtttaaagggtatttatttaaatgaattgaaagaggatttttgtgagtgggacgtatttcgtaggttttttttgcgttcgtttcggtgtttttaagagagtcgagtattttttttttcgggttttaggtcggttcgcggcgtcggagttaagttcggtttttagagattatttagtttcgtttttttttggtcgtcgtgaaaattcggtaggatggatcgttcggggttaggtttcgcgcgtttcggtcggatcgtgtacgtttggggttatcgggttgagtggaaagtacggaacggtaggaagttgtagtttagcgagtgggcggggcgaggagatttaggagggtttaaaaggaggtggaaggatatacgggttatagtcggaattatttttcgaaggaggttacgtgtgtttttagttggggaattttttaaatttttattttttagtgatagtttcggaggtaagtcgttttttttttttgttcggggtgtttttgtttggtgtaggtagcggaattttaattttttttgcgtcgcggcggaaataggggttcggattagtttttcgaaggagcgttgtcggggttggcgtttggggaattggttatataagtatttatatttaaatacgtgttttcgttttttcgtttgttggttgtcgtcgatttttatagaacgcggggagagagtttttaaattggtgttatttttcgtttgttattttaagagtaagttaaaggattgagatttgagatttattttttgttttatatcgatttattttgcgtttttttaaacgtgggaaaaggagttgggcgttagggttttcgggtttttttatcgttgatgttttgtcgtttagggtgaatttttttggttttgtgtttgagggtattttttgttgtagtttagagcgtgtatttttcgatgttgtaataaacgtttagttattatttttgagttggtgagcgcgttttatttattgtggatttagttaagtgatttatttggtttgagaatttagttaatggtcgttagtttagaataaatttgttaagtttgtttatagtttcgattgggttgatttgttatcgtgagagagttgattcggaaatgttgagagttggatcgtatttttatttcgtattttattcgttaaggatttataaagtaagtagtcgattcgtttaaagagaatgagtattaatattagtttgggaatttattgtttttttattttttttaggaagtagaattatagacgataatttgagttaaaaaatatttaacgagatttaggttgaagtattgagttgttttttaaattttgagagaatgagaattaatttgtatgtgtgtttaataattgtaagtgtttagtaaagtttaaagagggtttatgttgtatttgagaaagagtattgtatatgtgtatattatagttgtaggtaatttttgaagattagaaattttaagagatttagcgtagaaagttataggttattatttaatttcgggattattaattaaatttgggatatttatagtgtttttagagatttttgaggttttataaaattttgtatttatatatagtatttaagatagttgtgtaggagttaataatttgttgaagttttagtgttgatatttattgaagattggttttgtgtatagttttggttagtttgggaaaggtaaggattatagtggaaaaggaaatggaaagtaatcggaaaagagtaagagaaaggtttttagttgatttttagagatgtagatattgtttatatagtttagcgtgaattatagattttattattgtataaataattaaagataaggagtttttgatgtttaggtgttttattagattgtatggtaaaaattagagttgtgtttaattattaattattgcgtggtagaaaaagggaaaatgaagatgaatttttaaaaggggagtagattagggaggggtaaaatgttttatatttgttttttagattgttgattttgtttttagagtttttgttattagtattgtttttttttgttttttttttggagtttattttaagtgataattagttttatagtatttgagaatttttgaaatttgtttttatggaagtaaatgaaataagggtgtatttttgttttggtgcgatagaatttttttggattttatggtatagagttattttggagtagagataatttgtattattagtattaaagtgttagaatatgagattagtttttaagtatttttattcggttgaagaaagaaaatgggaaatgggttttattgtttttttaaatattaggtttttttatttttttttagtggtgaatgaaaggattattaatgttggtagatatttggttagtttaatagtaatattaggtggttattaggagttggtgaataaaattttttttttgtttttagtgttaagttgtttttgaaagaaatattgatgtatttttttttaattttttgtttttttttttttttttatttaaatggttggttttatttaaattaaagaaagttttaaaaatagtatttttttaaagtttagttgaaaatatttgtttggttgtatagatattataatatattggtttttaagtattttagttttttttttttttttttttttttttttttttttttgagacggagttttataggttggagtgtagtggtatgatttcggtttattgtaatttttgttttttaggtttaagtaatttttttgttttagtttttcgagtagttgggattataggcgtatattattatgtcgggttaattttttgtagtttagtaaagatagggttttattatgttggttaggatggtttcgattttttgatttcgtgatttgttcgttacggttttttaaagtgttgggattataggcgtgagttatcgcgttcggttatatttagttttttatttgtttggatttagaattagaatattatagggagaagtagaagtttgtaataaagggataattatataaagttttagggtgattatgtagattgattagtaagtatggtaaattagttttaattatcgtttttaatagttgattttaaaattttattgttattatattaaaataatgtcgaaagaaaattttttttttattttttttgataagcgaaatgattagtaatttgatgtggatgatataaatatttgatgtgttttttgtaggttatttgttaagatgttttttgtgtaaatattttgatttttatagtgttttttttattttttatacgttgattttttaaaaagggatttaatttaatagttttaatttttaaataattttttgtatttttgtttgtttaattattgttttttaaataatatagaatataaaaatataataattattggattgaatgtaaatttattgttttaagggtttgaggttttttttttattttatttattttaataataaatattattgtttttttaataaagataattttaagatattttttaaaaggcgttattgtgggttatataagtaattatattttaaaagagaattttttattattgtttataagttttttatgttttaaattttttttgaagttattttagatgttatggtgttattttttatattttggtagagagatgtgttgtatgaaattattatttttagagaaataagggttgagttggttgtttttgagaataatagagtagattaggtatttattgtgtttaagtggcgtttagaaattttgttttggatcgtggagtaatataaataaaaaagatataatatgataagatagttttgattatgttagtttttaggttaatattagttattaattattttatttggtttttttaatattaattttagttatatggagtatattgtttgttttttagattttttaataatagaaaaaggtaatttttatatattagaaaatattgggatatttattaggtgttttatagagtaggtcgaaattttttttttttttttttttttttttttttttttttttgagacggagtttttttttgttttttaggttggagtgtagtgacgtgattatggtttattgtaatttttgtagaatagttcgaatttgtttaggtagagggatattgagaaggagttaaaattttgttttgtttaatttttataatttttttttttaaaatatttttttggtttttaaggtattataaaaaata

SEQ ID NO: 152 - DNA, 6478 bp, Artificial Sequence
  chemically treated genomic DNA (Homo sapiens)
tttattttgaagggatgtttaagaaatattgttaaatttaaaagtgttgtagagtaatatgtattataagattatattggtataatagtaataaatagtatttttttatataattttaaaaaaatatatagatttatgttaagtattagttaagatgtttggtatatggtaggtatttaatatttaatgaatatatgtagaggatttttattttttattttatattttttggataagattttgaatttttatgagtatgtattatttaaatttagatttatagggagtgatggaaaatgtgaaaataaaattttaaaaaggaaaagaaagagtaaagatttagatttaaaaaaggaaatgtaaataagatgaaatagttaaagataggtttttttaaaattaatgttgagataatgttattagtagtgatagttagttaagagatggttcgtagtttattgtttagtattgaggtatttagtaggggttgtatttaatttttaagttggaattaatcgaaattgttgggtttgaagagttgtttttatgagttatcgacggtagaaagtatagaagtattaaagaaaataatttagaaatgtggaaagagaaaagtatgtttttgttttgggagaataatatttgtgtgtaattaagtaggaagattttgtggaggaaagtttgaaaaagtagagagttgaagagaaaagagttaaatgaaggatacggtggttaatatttaaagtaaaaagatatttttgaagaagatgtgtttttagggtttttaagaagtcgttatatttatgtttagagttattttgtaagtttatttggaaagtgtattggtgttttttggtataagatttacgaatattaatagttttgttatgtgagtaggtgtttatattgaagggttataagtaaagtttttatgtgttattattgttagaatttttttcgtttttttttaatataaaagtagttttgtttgttagtatggaagttttgggaagagttttatatttgtttcgtgttgttaatatttttgttttggtttttttgttggaatatataagttatttagtattagttatttatttttttggtagaattgtggtaagaggggattaatagggaaaaaaaattaaaaaataaataaaaagttaaaataatatgaaagagttgggtatgtttttaaaataattagtgtttattttttttagttttgtgtttgtgtttgtttgtattttgtatgtttgtttttgtggtggggggggatatgtttgcgtttttgaaaatttttttatttagatattataaggtattagtttaattttgaatatagtcggttgtagtacggtgtatagatacgattgttttttttttagaaaattttttagtttaaatatgtttgtagagtatgatttatggtgtttttttttggattgtttagtgggtaattgttgtacgaaaattagagaaatagatgtagattttgaattttggttataaatttttgttttatgattatgggttttaaatgtgttgtgttatattgataaatatatagttattttgaaataaaatggattttatttttaaagttttgttttttgttttttattttttgtttgtttgttggttggaaatatatttattagattattgattaaatataaagaaaatagagatgatatatattagaatgttattttatgttataataagaagatatttgggaaagttttttttaattttgtggttaatgtttaaaatgggtgttagtagtttatattttattacggataaatcggtttattttttattttttattttatttattaatttttatagtgtacggatttgtatttaaagaattatggtttatttatgtattttttttttattttatttaaaatgaagaatttggagatagaattaagtttttaagaagtgtaagtatttattgatgaagaaataattagtatgtggttaaattatgggtttgttttataaattaatatttggattaagtaatagttttaattattgttattagtataattaatttatgatgaggaatgattaattgattagcgaatattgttatattataagaaatttatattattttttttatggggatttaaatattgattatttattttaaggtttaagtttattttttagttgagaattttaaggtaattatatattttatatttttttgtataaagaaagaaaatatcgagtcgtttaatttttattatatatagagagagatatattaatgttgttatttttgtgtaatgatatagtatagaggtaagaaattcggaagtagtggtttcgtttaatgaggttgattttatagtttaagaaatgagaatgaatagaattttgaggatatttatttttatttttatttttttgggattagtgtatttttattttttggagagatgttaagtaagaatgtgtagtagttttttttggataatagatttttgtatatatatatttgttagtgatgttatgttttttatttttaatttaagttttttttgttttatttttaatatagttgttttttttttttttgtttaataattttttatttatttttattgttcggtaaaaatgaatttagtttttaaggaattttaaggattttaaataagtatttggagttataagttttatggattaagtagaaattggtatataatgtagtgttttgtgtatttttataattattttaatgatagtgtgttaaatgttttgtaaatttttttgtgtttttttgtttaaaatgtgtgttttttttgtagttaaagggttttttataataagtttttgttataaaatgatggttatataaaagagagaagagaggcgtaaaaataataaatatagatttagtaaaaattttatttttttattgttttgaattttttaatagtaagaattgagtttgttgggttgaaaattgttttaatgtatttttataaaaggatttttgatttggtaagtgtgtgcgatgtatattttttatgttatattataagtgttatttagtaattttattagatagggtagtgttttagtatggggtggggtgttttttgataggtttttaaaaggttcggatgttaatgtatattttaatattatttataaaaaggagattggagtagtgtttttttttgtattgggtaaggagattttttttttttgtttaattatttgtttgttttgttttgtgggagaattataagtaaatgttatagaggtagtggagaaaaaagggtgttttaatttttttttagagttttttttatttgatgtatgttgtattttttaaataagttgtgtaaaatggttgtagggtagattggtttttttttttaaagttttttattcggttgggtttatttgtaaatattgtatttattttttttagtgttttaggattggttggaaagatttttttttttgtaggttgggttagtgtgagagatttaaaaaattatttttttttaaaattattgtattttaataaaaggattgggtaggggttggaatgagagaaaattggttttttaaaatgtaaaattgttatatttaaattagtttataaaatatgcgtttaattatgtggtgggatgtgtgtaggtgtatgatgagagaggtaattaatatggttatttggggtgtaaggatgtgggaataggtaagtaatttttatattggatttttattttagggagttgggttttagttatagttttgagttgtgtgattttgggtaggttttattttttcggggttttgttttattagttgaatagtatgaggatgagttatagttaatatttgttttatgatatttatttagtattatataagtgttatttttgtttttttagttaatattgacgtgggtagtattatatgtttattttatagatgaggaaattgaagtttgaagaagttaaatatttattttagaatatatagttggtaagtggtagatttggaattggaatttagtttagtttgattttttaatttatgtttttgattattatattgtttttttaagtttagatttgaaattttattttttgtgtggttgtgtgtttgggataggggtaattaatttttgattattttatatgttgtatagaatttggagaggattttttaaagtaaatgaatttcgaaagttggattgtagagtaaacgagtgtagttaatttagttaggggtttgtaagagggagaaagagaaaaagattgtggaatggaaagttttttaatttaagttttttttaaggggtagttattttttgttttatagtttagggtttgtatgtgttttttttggagtggaaaaatatataagttataaggaatttaatagatagaaaggcgtatagaggaatttaaagtgtgggttggggggcgaggcggtgggcgggaggcgagcgggcgtaggcggaatatcgttttttaagttaagtcgtcgtaaataaaaaggcgtaaagggagagaagttggtgtttaacgtgagttaggagtagcgtttcggttttttttttgtttattttaaaagtattttttgtattgtttttaaggtgagaaataggaaagaaaacgtcggtttgtgcgttcgttgtttgtttttttggttgtttgtttttgtagggttgttgggagtttttaagttttgtgagaattttgggagttggtgatgttagattagttgggttatttgaaggttagtagttcgggtagggtttatcgaaagtttattcgtatatattaggtaatttaattttttattttgtgtgatagaagtagtaggaagtgagttgtttagaggtaggagggtttattttttgttaaaggggggattagaatttttttatgcgagttgtttgaggattgggatgtcgagaacgcgagcgattcgagtagggtttgtttgggtatcgtcggggtaggattcggaacgtattcggaaggttttttgtaagtatttatttggaaggagaatttgggatttttttgggaatttttcgtttcggttggattggtcgagtaagtttggaaaatggtaaatgattatttggattaattataggtttttagttggtttgtttgttataatttatgattcggggttgggaaaaagattaatagtttacgtgttaaaaaaggggtagagtttgatggagttgggtggatttttttatgttatttgtttttatatttagaggataagtatttttgtagatatttagtgtaagggagattatgtttgattgtatggatgttttgttagtgagttttgggtaaattttggatttttatattgcgagttcgtttttttgtatgttttaggagaaagtttttaaagtatgttttagtggattgatttaaatcgaatggtagtatcggtatattgtttaatgtaggtttatttttttttttttttttattaagaaaaaaaaaattgttttttttgtatgtaataaagacgttggaaataaattgtattggtagtaagataaaggatttaatgatttaatgttgaaggggtgtgatatgttggtatgtatattgattttttttgttgaaaattttttgttagatgttttttttttaaataatttttttcgtttttatgtttttttttttattaattttatagttttttgaaaatagtttttaaaatatgtataaaaatgtggggggtggggagtagagggtgattataagattttaaaatattttttaagtagggtaatttgatatattttgtagtttttattaaaatgtatgtagagtggaatttaattttgttgttttttggattagttattagttgtataggtttttttattttttgtgtattttaatagtttaaagtaattaaaatatgatattttttttgaaaggaatttagtttaattaaggtggttgttgttttcgaagtttataaattattagtttaagttgtcgtttttaatgttttttttgttaaggaaaggtaatattttttagtattgattttgttgttatttttttaagttattttgttggtttaagaagttgttgttttgttagaaaattattggtaatgaatattttttggattgagttatttattatttttatattttgtagtttagttcggaacgtggatattagttaaaggaaaggaaatataagtggggtagtttaatttaaaaaaaaaatattgattattttgttatttgatgttgatatagtgtcgaggtacgtatttggttaatagtagtttggttgtaggtttgagaaatgattaggagttttagaaaattttattttcgggtggttgtagtgggagtttgtaggatgtttcgtcgttttgatagtgatttagataaatggtttagttatttattaaaatgtttttagtattttatttg

SEQ ID NO: 153 - DNA, 6478 bp, Artificial Sequence
  chemically treated genomic DNA (Homo sapiens)
taaataaagtattaaaaatattttgatagatagttgagttatttatttaaattattgttagggcggcgaagtattttgtaggtttttattatagttattcgaaggtgggattttttgggatttttgattattttttaagtttgtagttaggttattgttgattaggtgcgtatttcggtattgtgttagtattagataataaaatagttaatattttttttttaaattgggttattttatttatatttttttttttttaattgatgtttacgtttcgggttgaattgtaagatatggaaataatggatggtttagtttaaggggtgtttattgttagtagttttttagtaaaatagtaattttttagattaataaagtgatttggaaaggtggtagtagggttaatgttaagaaatattgtttttttttagtaaggaaaatattggaagcggtagtttgaattggtggtttatgaatttcgggagtagtagttattttaattaaattaaattttttttaaggaaaatgttatattttaattattttggattgttggaatatataaggggtggggggatttatataattagtagttaatttaaagaatagtaaagttaaattttattttgtatatattttagtaaaaattgtaaaatgtgttaaattgttttatttgaagaatgttttaaagttttgtggttattttttattttttattttttatatttttatgtatattttaaaaattgtttttaagagattataaggttggtaaggagaggagtatgggggcgggaggggttatttgggaagaaaatatttaataggaaatttttagtaaagggaattaatatgtatgttagtatattatatttttttagtattaaattattaaattttttgttttgttattaatgtagtttatttttaacgtttttattgtatgtaagagagataatttttttttttttggtagaagaagggaaaaaaataaatttatattgagtagtgtgtcgatgttgttattcggtttgggttaatttattgaagtatgttttgagagtttttttttggagtatgtaggaagacggattcgtagtgtagaaatttaggatttgtttaggatttattgatagaatatttatatagttaaatatgattttttttgtattgaatgtttgtaaaagtgtttattttttaggtgtggaggtaaatggtatagaaaagtttatttaattttattaaattttgttttttttttggtacgtaggttgttggttttttttttagtttcgaattatgaattatgatagataagttagttaaaagtttgtaattgatttaaatgattatttattattttttaggtttgttcggttaatttagtcggggcggggggtttttagaaagattttaagttttttttttaagtaaatgtttgtaaaaagtttttcgaatgcgtttcggattttatttcgacggtgtttagataaattttgttcggatcgttcgcgttttcggtattttagtttttaaatagttcgtatgggggaattttggttttttttttggtaaagaatagatttttttgtttttgaatagtttattttttattatttttgttatatagaatgaaagattgaattgtttaatatatgcgagtgaattttcggtgaattttattcgggttgttaatttttaaatgatttaattagtttgatattattaatttttaggatttttatagagtttaaaaatttttagtagttttgtaaaagtagatagttagagaggtaggtagcgagcgtataagtcggcgtttttttttttattttttattttaaaaataatataagaagtgtttttaaaatgagtaggggaggagtcgggacgttgtttttggtttacgttgagtattaatttttttttttttacgtttttttatttgcggcggtttagtttggaaaacggtgtttcgtttgcgttcgttcgtttttcgtttatcgtttcgttttttagtttatattttaaatttttttgtgcgtttttttgtttgttaaattttttataatttatgtatttttttattttagaaaaagtatatgtaagttttaaattgtagaatagagaatggttattttttgggaaaggtttgggttgggaaattttttattttatagttttttttttttttttttttttgtaagtttttggttgaattgattgtattcgtttgttttgtaatttagttttcgagatttatttattttgaaaaattttttttaggttttatgtagtatatagagtagttaggaattggttatttttgttttaaatatatagttatatagaaaatgagattttagatttggatttgaaaaaatagtatagtggttaagagtatgggttggggaattaaattgaattagattttaattttaggtttgttatttattagttgtgtgttttgggataagtatttaatttttttaggttttagtttttttatttgtaaaatgggtatataatattatttacgttagtgttaattgggaggatagaaataatatttgtatggtgttgggtaaatattatggaataaatgttagttgtgatttatttttatattgtttaattggtgaaataaaatttcggggagatgagatttatttaaggttatatagtttagagttgtgattagaatttagttttttaggatgaaagtttaatgtgaaaattatttgtttgtttttatatttttgtattttaaatagttatgttggttgttttttttattatatatttatatatattttattatataattaaacgtatattttgtaaattggtttaagtatgatagttttatattttgaaggattagtttttttttattttagtttttgtttaatttttttattaaaatatagtaattttaagggaaaatgattttttagattttttatattgatttaatttataggaagaagagtttttttagttagttttaaaatattaagaaggatagatgtagtatttataaataaatttagtcggatggagagttttaaaagggagagttaatttattttgtagttattttgtataatttgtttaaaggatgtaatatatattaaataaaggaaattttggagaggaattaaaatatttttttttttttattgtttttgtagtatttatttgtaatttttttataaaatagggtaggtaagtggttaggtagggagggagagtttttttgtttaatgtagggaagagtattgttttagttttttttttgtggatagtgttggaatgtgtattggtattcgggttttttaaaagtttgttagggggtattttattttatgttgaaatattgttttgtttagtggagttgttaagtggtatttgtggtgtaatatgaaaagtatgtatcgtatatatttattaagttaaagatttttttatgaaggtatattaaaataatttttagtttagtaagtttagtttttgttattgaaaagtttagggtaataaaggggtgagatttttgttgaatttgtgtttgttatttttgcgtttttttttttttttttatatggttattattttgtaatagagatttattgtaagaaattttttaattataaagaaaatatatattttaagtaagagaatatagaggaatttataaaatatttaatatattgttattaaggtagttgtaaagatatataaagtattatattatgtgttaatttttatttggtttatgaggtttatggttttaaatgtttatttaaggtttttagagttttttggaaattgagtttatttttatcggatagtggaggtggatgaaaagttgttagataagagaagaggaaatagttatattggaagtagagtaggagaaatttaagttagagatgagaaatatggtattattgataggtatgtgtgtatagggatttgttatttaggggaggttgttgtatatttttgtttaatatttttttaaagagtagagatgtattggttttagggaagtgaagatggggatgggtgtttttaaaattttgtttatttttattttttaagttatggaattagttttattgagcgagattattgttttcgaattttttatttttatattgtattattgtataaaaataataatattagtgtgtttttttttgtgtgtggtaaaggttgggcgattcgatgttttttttttttgtgtaagaaaatgtaaaatatataattattttgaagtttttaattgagaaatgaatttgggttttgaaatgaataattagtatttaaatttttatgaaaggaatagtatgggttttttataatatgataatattcgttagttaattaattattttttattatgaattaattatgttgatagtaataattagagttattatttaatttaagtattaatttataaaatagatttatgatttagttatatgttaattatttttttattagtaaatgtttatattttttgaaaatttgattttgtttttaaattttttattttaagtaaaatgaaggaaagatatataaataagttataattttttaaatatagattcgtgtattataaagattaatgagtagggtagaaagtgaaaaatagatcgatttgttcgtaatgaaatgtaaattattgatatttattttaaatattagttatagggttggaagaaatttttttaaatatttttttgttatggtataaaataatattttgatatgtgttatttttattttttttgtgtttgattaatgatttaataaatgtatttttaattaataagtaaataaaaagtgaaaaataaaaagtaaaattttgagagtaaaatttattttgttttagagtaattgtatatttgttagtgtgatatagtatatttgaaatttataattataaaataaaaatttatagttagggtttagggtttatatttgtttttttggttttcgtatagtaattatttattggataatttagaaagaaatattatgaattatgttttgtaaatatgtttgaattggagagttttttgaagaaagagtagtcgtgtttgtgtatcgtattgtagtcggttgtgtttaaaattgggttaatattttgtgatgtttaaataagaagatttttagaggcgtagatatatttttttttattataggggtagatatgtaaagtgtaggtagatataggtatagggttgggggaggtggatattgattgttttaaagatatgtttagtttttttatgttgttttggttttttgtttgttttttaattttttttttttgttaatttttttttgttatagttttgttagaagaataaatggttagtattgagtgatttgtgtgttttagtagggaagttaaggtagagatgttggtagtacgaggtaagtatgaggttttttttagggtttttatattagtaggtagagttgtttttgtgttggaagggagcgggggaagttttaatagtaataatatatggaaattttgtttgtggttttttagtatgaatatttgtttatataataggattgttgatgttcgtggattttatattaaaagatattaatgtattttttaaatgaatttgtaaggtggttttgggtatgagtatagcgattttttagaaattttagaaatatattttttttaaaaatgtttttttattttgagtgttggttatcgtgttttttatttggtttttttttttttagttttttgtttttttagatttttttttataaagtttttttatttggttatatataaatattgtttttttaagataagggtatatttttttttttttatatttttgaattattttttttagtgtttttgtgttttttgtcgtcgatgatttataaagatagttttttaagtttaatagtttcggttggttttaatttgaaagttaaatataatttttgttgaatgttttagtattgagtagtgagttgcgaattattttttagttgattgttattgttggtggtattgttttaatattagttttggggagatttatttttggttattttattttgtttatatttttttttttaaatttagatttttattttttttttttttttttaaaattttatttttatattttttattattttttataaatttagatttaagtaatatatgtttataaaaatttaaagttttgtttaaaagatataaagtgaaaagtaaaagttttttatatgtatttattaaatgttgaatatttattatgtgttaggtattttaattggtgtttggtatagatttgtatatttttttgggattgtgtgggggggtgttgtttgttgttattatattagtatggttttatgatatatattgttttgtaatatttttaaatttagtaatattttttgaatatttttttaaaataaa

SEQ ID NO: 154 - DNA, 2534 bp, Artificial Sequence
  chemically treated genomic DNA (Homo sapiens)
aggtaggaaagtgggatagtcggggagttggattttattttttgtgagtttcgttggtatttgatggtatgtggtttggagagggtaggtgatttggcgtggagggttagagggtaaatttttaaataagtggtaataggttattaatttgaaagggaaaattgtgtagtgatgggaaatgtgtttaataaatttattgggtgattaattataaaggttgggttggagttttagaggttgtttgttaaatattttattaagcggtattttgaaagttgttatttgcgtattttgggagtttagaggggattttgagggggaatgaggtttggaggatggaattatttttaggtagattgagaaggagtttggattttatttttaaatatagtttggagtttataggttagaggttttaatgggagaaaagttaaaggaagagggtgtagaaaggagttttagggaattggtggttatgtgattttgagtaaattttatttttttttgagatttagtgtttttatttttatggttttgtgtgtgttatagagatatggtggggattaaattcgatcgtgatatgaaagtgtttgggaaattttatggttttatttaaatatgagttatttttatttgaattaaggggggaagttatttggtaggattaggaattttatttttttgaatttttatgggttttgtcgaggttgaagtagttaggggttaaagttagtttttagtttttggaagggtattgtgaaagtggatttgatttgagaagtcgttttttgatgtgggtagttatgtgatgttagtttcgaataagagggggtagtttggagtttggaaaggtgttagtgtaggtggggtttacgtttagattttttttgttgattgttttgatgatttatttttatattttagtttttttatttttattgtagagtcggaaagggtgtggggaagagaggagagggaggtaggttttgggttttggtttcgttttttgtttttttttatttttttttgggtttggttatttagttaaaaggtaggttaagagtaggagagatatagagttcggtattggttttaggtagtagttagttcgtcgttcgtttgtgtgtttttagagttatggagagagttagtttgatttagaaggttaagttggtagagtaggtcgaacgttatgaggatatggtagtttttatgaaaggcgtcgtggagaagggcgaggagtttttttgcgaagagcgaaatttgtttttagtagtttataagaacgtggtgggcggttagagggttgtttggagggtgttgtttagtattgagtagaaaagtaacgaggagggttcggaggagaaggggttcgaggtgcgtgagtatcgggagaaggtggagattgagttttagggcgtgtgcgatatcgtgttgggtttgttggatagttattttattaaggaggtcggggacgtcgagagtcgggttttttatttgaagatgaagggtgattattatcgttatttggtcgaggtggttatcggtgacgataagaagcgtattattgatttagttcggttagtttattaggaggttatggatattagtaagaaggagatgtcgtttattaattttattcgtttgggtttggttttgaattttttcgttttttattacgagatcgttaatagtttcgaggaggttatttttttggttaagattattttcgacgaggttatggttgatttgtatatttttagcgaggatttttataaagatagtatttttattatgtagttgttgcgagataatttgatattgtggacggtcgataacgtcggggaagaggggggcgaggttttttaggagttttagagttgagtgttgttcgttatcgtttcgttttgttttttttagttttttattttgtcgagaggattagtatggggtgggaggttttattttttttttttaggcgttgtttttgttttaaagggtttcgtggagagggattggtagagttgaggttatttggggttggggattttattttttttgtagttgttgagcgtatttaattattggttatgtttttatttttgtttttcgtattcgttttttttcgattttaggattaggttattttttttttttttttgttttttttttgtttttgttgtttttgatcgtaggaattgaggagtgtttcgttttgtggttgagaattggatagtggtaggggttggagatgggtgtgtgtgtgtgtgtgtgtgtgtgtgtgtgcgcgcgcgttagtgtaagatcgagattgagggaaagtatgtttgttgggtgtgattatgtttttttttaataaagtttttttgtgatattttttttgttttttttttagtttttggcgatgggttgggagtgggattggaatttgatttagagattttgattttggatttttgagttagggttttgaattttttaggtggtttagtggttcgtacgtaagattttgagtttaggtgaggtcggggttt

SEQ ID NO: 155 - DNA, 2534 bp, Artificial Sequence
  chemically treated genomic DNA (Homo sapiens)
ggatttcggttttatttggatttaaagttttgcgtgcgggttattgagttatttagggagtttagggttttaatttagaggtttaaagttagggtttttaagttagattttagttttatttttagtttatcgttaagaattggaagagagataggaggagtgttataggggaattttattgagaggaaatatggttatatttagtagatatgtttttttttagtttcggttttgtattggcgcgcgcgtatatatatatatatatatatatatatatatttatttttagtttttgttattgtttagtttttagttataaggcgggatattttttaatttttacgattagaggtagtaggggtaggagggaggtaagaggaggggagaagtagtttggttttggggtcgggaggaagcgggtgcggagagtaggggtgggggtatgattagtggttaggtgcgtttaatagttgtaagaagagtgggatttttagttttaggtggttttagttttgttagtttttttttacggagttttttggagtaagaatagcgtttaggggagaagggtggggttttttattttatattagttttttcggtagggtgggggattggagggggtagggcggggcggtggcgggtaatatttagttttggggtttttggggagtttcgtttttttttttttcggcgttgtcggtcgtttatagtgttaggttgtttcgtagtagttgtatgatgagggtgttgtttttgtaggagttttcgttgagggtgtgtagattagttatggtttcgtcgaaagtggttttggttagagagatggttttttcggggttgttggcgatttcgtagtggaagacggaaaagtttagggttaggtttaggcggatggggttggtgggcggtattttttttttgttgatgtttatggttttttggtaggttgatcgggttgagttaatgatgcgttttttgtcgttatcggtggttatttcggttaggtagcggtagtagttattttttatttttaggtagaagattcggttttcggcgttttcggtttttttgatgaggtggttgtttagtaggtttagtacggtgtcgtatacgttttggagtttagtttttattttttttcggtatttacgtatttcgggttttttttttttcgagtttttttcgttgtttttttgtttaatattggatagtattttttaggtagttttttggtcgtttattacgtttttataggttattgagagtaggtttcgtttttcgtaggagagtttttcgtttttttttacggcgttttttatgaaggttgttatgtttttatagcgttcggtttgttttgttagtttggttttttggattagattggttttttttatggttttggggatatataggcgggcggcgggttaattgttgtttgggattaatgtcggattttgtgttttttttgtttttggtttgttttttggttgggtggttaggtttagagaagggtggggaggagtagggggcgggattagggtttaagatttgtttttttttttttttttttttatatttttttcggttttgtagtaaaggtaaaaaggttgggatgtgggggtgaattattagaatagttagtaggagaaatttgggcgtgggttttatttgtattggtatttttttaggttttaggttgtttttttttgttcggggttggtattatatggttgtttatattaggaaacggttttttaaattagatttatttttatagtgtttttttaggggttaaggattggttttagtttttggttgttttagtttcgatagagtttataaaggtttaggaggatggggtttttaattttgttaggtaatttttttttttggtttaggtgaggataatttatgtttaggtagggttatggagttttttaagtatttttatattacgatcgaatttaatttttattatgtttttgtgatatatataggattatagagatgggaatattaagttttagagaggggtgagatttgtttaaagttatatagttattaattttttgaaatttttttttgtattttttttttttagttttttttttattgaggtttttgatttatgagttttagattgtgtttggaagtgagatttaggtttttttttagtttatttgaagatggttttattttttaggttttatttttttttagggttttttttgagtttttagaatgcgtaggtggtagtttttagagtgtcgtttaatgaagtgtttaataagtagtttttgaagttttagtttagtttttgtaattagttatttagtaggtttgttggatatattttttattattatataatttttttttttaagttggtggtttgttgttatttgtttgaggatttattttttggttttttacgttaggttatttgttttttttaagttatatgttattaggtattagcggggtttatagagggtggggtttagtttttcggttgttttatttttttgttt

SEQ ID NO: 156 - DNA, 6558 bp, Artificial Sequence
  chemically treated genomic DNA (Homo sapiens)
taagattataaattgttttttattagtggggaaggttttaaatattatgtatttagtataagtaggtgtaattaatcgtaacggtttgttttgttattttcgattaatatataattattaggttagaattgtattttataagttttttgcgtttagttattttgtatatattaatttttttaagttttgtgttttaaaagaattgtatagtgttgggaagttttttatttattttaatttttagggtatcgagttcgaattcgaattaggtattaggtatgttttattattataaaagatgtaaaaagatgcgtatagtggcgtatatttatagttttagttattgaggaggttaatgtgggaggattatatgaggttgtagtgagttgtgatggtgttattgtattttagttttggcgatagtgagtttatgttttaaataagtaagtaaataaaaattaaaaagaatttagtttatagggtatttgaaggtaagaggaaaagatgttagaattagagatggggagaagatgggtttttggcgtttgttgaggttgagaaatgagatagataggttgagtgtggggtggagagaggatgggtagagagattgaggttggtttgaatggaaatgaaatgttagggtttttagggttatcggggaataattggagtttttaggaaaggtttaacgttgtgattatttgtgttcgttatgtttttttattttttattaattgtgtgaatttggtagattttgagttttagtgtttttttttgtgaagtggggttattttattttaatttttgggattgttgtgtgaattaaatggggtaatgtacggagagtatttgacgtatagcgagtgttttaaaattttagtttgtattttttagtaaaggatatgtatacgtttattgtgagtgataaatttaggatgatttgaatttaatgtgataacgtgggttttcgtatgttggttatgttgtcgggagatatttatggatttaattagtataataggggaaataaattatttaatgtattttgttaagatagaatattttagaatttattttgtggggcggggtataataaagggggtttttttgttgaaaacgtttaagtttaggttcgtggtattatttaattaaggtcgatagttatatagtaagttagaggtaatgttaggatttaaattaaatttgtggtttttataatgaggttattttttttttttttgaacggtttggggaaagggggtgggtgggtagaatttggtagtggttaattttttatttttgttttttggtttttttttgtttttatttttaggtttgtattgattgattgattgagatagggttttgttttgtcgtttaggttggagtgtagtggtacgattatggtttattgtagttttaaatttttaggtttaagtggttttttcgttttttatttttcgagtatttatatttttaggtttttaaaatggtttttaggtatttggttgtcgttttagatatttatttgggtttttgggtagggattgttcgggaaattttatttatgtgaagtaggtgtgggtgtaggaaggtcgtttggaaatgaattagtattgttttttgtttgagtcgtaagtagggcgttagagggtttggcggataagaaagggaggatgataggaggtcggtattgtaatgatacgttttagttattagagggtacgaagtagttgggtaaaatttcgcggggtcgttggtggaaaatttttggtatttggagttcggagatggggtggacggaatgtgaggatttagttttttgaggttgggtcggggtagagttattgttttggatgttcgtagggtttgtttgtgttttgattattttgtttttgtagatagttggagaatgtgagagtgggattgggatcggattttaggggttatttcgtataatttttttgttttgtcgtgggggagggagttgtttaaggttacgtagtaagttagtggtaaatgaatacgattattattagttttaggtatatggttatttgatgggcgtagtcgtagttttagtttttgagatagagatatttgattaaggataggtttttaggagttgattttagtgattcgcggttttgttgttgtttttgtttttttttttggtttttttatttgattgattttttgtttttttcgtttgtttgtttgttttcgtttttgttcgttggggggtttgtttaatttttttattgggttttgggagtcgtagttttttgttgttattttttagggatttgtagttttttgaagttttttttcgattcgttgtttcggttttatttttgggatttagaggagaggtgattatttcgtagtatagttagtggtgtgattttacggggtgagaaggatttttttgtttttaagtatttttttagtgatttttgttgttatgtggtagtcgtaagtattggttggtatttggtgtgggcgagatttttattttatgtagaaatgagtaagatcggtgagtttattatgtgggggtgaggttgagagaaaataagtatataggtgatttagttaaaattagaattttttaagtatatacgaaaagggtaaaaggggcgttttgtataggatagaataggtagatattgaattcggttgggttttgggaaggttttttgtagtggtttttgaagggggggttggattttagtaggatagagggtatgggtatgtgtgggtacgttttgaatagaggggttagcgtaagtcgagggttttggttatattagttgtatgtgtcggtgtgtttaagggatacgtagtagtaggtcgagtttggagcgttttattgttaggttttttaaaaatttttaattttaatttaattttattttatttttattttaagttttggtatatatgtgtagaatgtggtttgttatataggtatatatgtgttatggtggtttgttgtatttattaatttattatttaggttttaagtttcgtatgtattaggtattagttttaatgttttttttttttttgtttttattttttttttcgtaattgtttataggttttggtatgtggtgtttttttttttgtgtttatatgtttttattgtttaatttttatttatgagtgagaatatatcgtttggttttaagggatagttatggggatgtattgtagtttttgagtagggaaggttttgtggaggtttttagttaaaaggaaagaatggttgtgaaaatcgatgtattgcgtttttttgttttttatttttagtgtgaagggtttttatttcgagttttatttgaagtaggtttcgatgggaagataagtagtatgaggggtttaagtattgaggggagtaagggatattcggtggttgtgttaaggtgtagaagaggatattgggggttttaaggtttgattttatgtatattgtttaggttggtttttaagttatacggtgatcgttaggaagggattagtttgtttttagtttgatttttttgttatgttattatttaaagttttttttggtagggtttgtttggggtttttgtgttagtgttttttttgttaggttgggttggggtttttatttattgttttgggattgttgttgttttggttttgggggaggagggtgtgtcgttgagttattgtttgggtatttgggtttggaatttcgggtgagttatttagggttgaggtagaggggttgggggaggggaagaagttattcgatagttggagtagggaggggagttggggttataggaagggcggtgttttgatgtttagacgggtcgggatagataaagggttaaggaggaaggggttttgggagggggtagtttttttttgggttgggttttgaatggttatagtgtttgttttttttcgggtttggggaggatatgtgtgtggggggtagtgagagagggttgtggttgagggttgtgttttaggtttggattttggtttgggaagttgtttagttggtgtttttagttttgggtagggatgtatttttatttatttatttagtttttaagttggagaagaggaggttaaagtttttttgtttagtttttaattattcgggatttttttatgttttttatagattgtggtttagtttaattgcggttgtgtgtagagtaattttattttttattgtttttttatttttttagatatttttttatatagagggatttttttaggtatttttaagtatatttagttattttattattttattaagaggtattttggtgttggttattaaaagttattttattttatttatgttttgaagttagttttgtttttttttttttgatgttttttagttgttttttttggtttttagttttttaagggtggttttaggttgttttttttttatatatataggcgtatgtatgtatacgagtattggattatgaagttttagcgtgtgtttatagttttttatataggagtgggttgtgatttataggtatgttatgagaatgaggtttggtattagtttttaggttttagagtaggggttgtttttttttatttcggtttaggatgtttagtttttacgatattttttattttttattgtggtttgggtgggtttaggggttgtttttgatttggtttagagtttttttttagttggtggtggagttggtattttttgggagggagggggttgggagggaatgagtgggaatggtaagaggttagggtttggtgggattaggttgaggtaggtttggtttttttaaaatgttaagttgggggttagtggggtttatatataaatttttattttgggagtttggttgttttgtttttttttttgggtttgtttttgttatttggtttggtgagtatttttgttttgttgagggtagggtggggaggattttcgtgggtttttgtttttgtttttatagtttttttattttagtttttttggtgggattaatttgggtttttttgggtttttttttttggaagaattttttgtgaagtgttgaagtgttgattgaagggttttttttttttttttttttttttgagatggagtttcgttttgtcgtttaggttggagtatagtggtgtgattttagtttattgtaaatttttttttttaggtttacgttatttttttgttttagtttttcgagtagttgggattgtaggcgtttattattatgttcggttaatttttttgtatttttagtagagatggggttttattatgttagttaggatggtttcgattttttgatttcgtgatttatttatttcggttttttaaagtgttgggattataggagtaagttatcgcgttcggtcgattgaagggtttttttttaggtttttttgtgaggttttagtgtaggggttgttttgaggtttttttttggatattttagtttaggggtttttttttgggggtttaggtttaggagtaggaggtgtgtatgtgggcgttgttgtaaaaagaattttgagatttttttttttttttttttttttttttgtaaagttttggattttagtaggattaaggtgtaagaggtaggggttttaagattttgtttgggttatggttttaagtagtaaagttttgttttttgtttcggtgaaggtagggttggtatgatgggtttagggtatgttttgtttttggtatagtttttttggttttattttgaaatttgtttaatttttttaggttggtttgagtatttttagaggttttgtcgttgaggtttgttttattttgattttaaggtaatgaatattttatatttttaattttaattttaataggattttttttggtggagagaatgttaagttgtttttattttatttatgtttttgtttgtttagaggtttaggggtttttagggtgaggggagatatattttttattttttgggagtttttagtttgagagaggaaatatttttgtttaagggagtttttagttagatggtagagagagatgtttttggttttaggagtttcgagtttaaggagggaaacgatttttttagggagttttttgtttttaggttgtagttatggtttttgttagattgtataggagtttttatttgttagtcggtgtatgtggttttgttttttagagtttgcgtagatgttattaaaatgggattttggttattttgttattttttttttggtagatattaaaatggggagttttgtttttaggggggtgttttaagtgttattagaggaggtttggtgatttttagatataagggaagttttagcgtttgtttttagggtgagatggaggtatcgttttcggttttagggaattatagtttgagggggagatgtagtttttgtttttttatttagagaggggttttgtgaggtggtttgggggtatagggtagaagtggattttataggttgagttaaggttttaagagttttagtagtgtatttattatttggtatttttgtagt

SEQ ID NO: 157 - DNA, 6558 bp, Artificial Sequence
  chemically treated genomic DNA (Homo sapiens)
gttgtagaggtgttaggtgatgggtatattgttgaggtttttggggttttagtttagtttgtaggatttatttttgttttatgtttttaagttattttataaaatttttttttgaatgggaaggtaggggttgtattttttttttagattgtggttttttgaggtcggaggcgatatttttattttattttgagggtagacgttaaagttttttttgtgtttgggagttattaagttttttttgatggtatttgggatatttttttgagggtagggttttttattttagtgtttgttagaagggaaatgatagggtgattagagttttattttgatggtatttgcgtaggttttggggagtagggttatatgtatcggttggtagatgggggtttttgtgtagtttggtaggagttatggttatagtttaggagtaggaagttttttgaaggagtcgtttttttttttagattcgggatttttgaagttagaggtatttttttttgttatttaattggaagtttttttgggtaggagtgtttttttttttagattaggagtttttagagggtggggaatgtgtttttttttattttgaaggtttttgagtttttaggtagataggggtatggatagggtgggggtaatttaatattttttttattaggaaggattttgttggaattagaattaaagatatgaaatgtttattgttttgggattaggatgggatagattttagcggtaaggtttttgagaatatttagattagtttggaaaggttaggtaggttttagggtgaggttagaggagttatgttagaggtagggtatgttttgggtttattatgttagttttgtttttatcgaggtagggggtagagttttgttgtttggggttatgatttaggtagagttttgagatttttgttttttgtattttagttttgttagaatttaggattttgtaaaaaaaaaaaaaaaaaaaaaaaaaaattttaggattttttttgtagtaacgtttatatgtatattttttgtttttaggtttagatttttaaagaagggtttttagattgagatatttaggggagggttttagagtaatttttgtattgagattttatagaggaatttggagaaaaattttttagtcggtcgggcgcggtggtttatttttgtaattttagtattttgggaggtcgagatgggtggattacgagattaggagatcgagattattttggttaatatggtgaaattttatttttattaaaaatataaaaaaattagtcgggtatggtggtgggcgtttgtagttttagttattcgggaggttgaggtaggagaatggcgtgaatttgggagggggagtttgtagtgagttgagattatattattgtattttagtttgggcgatagagcgagattttattttaaaaaaaaaaaaaaaaaaaaaaaattttttagttaatattttagtattttatagagagtttttttaagggggaaggtttagagaggtttaggttgattttattagggaagttggaatgagagaattgtggagataaagatagagatttacggggattttttttattttgtttttagtaggatagaggtatttattagattaggtggtagagatagatttaggaaggagagtaaggtagttaggtttttagggtgaggatttatatgtgggttttattggtttttaatttggtattttaaggaaattaaatttgttttaatttgattttattaaattttggttttttgttatttttatttatttttttttagtttttttttttttagagagtgttagttttattattagttgggggagggttttaggttaggttaagggtagtttttgagtttatttaggttatagtgggaagtgggaggtgtcgtggggattgggtattttggatcggggtgaggggaggtaatttttgttttggggtttggagattggtgttaggttttatttttatgatatgtttgtgagttatagtttatttttgtgtgagaggttgtgagtatacgttgagattttatggtttagtgttcgtgtatatatatgcgtttgtgtgtgtgagagagaagtaatttggggttatttttaggaagttgggggttagaggaggtagttgggggatattaggaggagaaggataggattgattttagggtatggatgaagtggagtgatttttaatggttagtattagaatattttttaatgaggtaatgaggtaattaagtgtgtttagaaatatttgggaaggtttttttgtgtaggaaggtgtttggaaggatggggaagtagtgagaaatggggttgttttatatatagtcgtagttgggttgggttatagtttgtggggagtataaggaagtttcgagtagttaaaggttgaataggaaaattttggtttttttttttttagtttgagggttgggtgggtgggtaggggtatatttttatttaaggttgaaaatattagttggatagttttttaagttagaatttaggtttgaagtatagtttttagttatagtttttttttattgttttttatatatatgttttttttagattcggagaaaggtaaatattgtggttatttagagtttagtttaagggagggttgtttttttttagggtttttttttttttggttttttgtttatttcggttcgtttgggtattagggtatcgttttttttgtggttttagtttttttttttgttttagttgtcgagtagttttttttttttttttagtttttttattttagttttaagtgatttattcgaggttttaggtttagatgtttaggtagtgatttagcggtatattttttttttttagggttagggtagtagtagttttagagtagtaggtggaagttttagtttagtttggtagggaaagtattggtatagagattttaaataggttttgttaggaggagttttggataatgatatggtaggaggattagattgagaataggttggtttttttttagcggttatcgtgtgatttgggggttagtttgagtagtgtatatgaagttaggttttggggtttttagtgtttttttttatattttggtatagttatcgagtgttttttgttttttttagtatttgaattttttatgttatttgtttttttatcgaggtttattttaagtagaattcggaataaaaattttttatattgagggtgagggataagggagcgtaatgtatcgatttttatagttattttttttttttaattaagggtttttatagggttttttttgtttagaaattgtagtgtatttttatggttgttttttaaagttaggcggtatgtttttatttataagtgggagttgaataatgagaatatatggatatagggaagggaatattatatattagggtttgtgggtagttgcggggagaaggatgggggtaaggggagggagagtattaggattaatatttgatgtatgcggggtttaaaatttagatgatgggttgataggtgtagtaaattattatggtatatgtatatttatgtaataaattatattttgtatatgtatgttagaatttaaagtaaaaataaaataaaattaaattaaaattaaaaatttttaaaaagtttggtagtgaggcgttttagattcggtttgttgttgcgtgttttttaaatatatcggtatatgtaattagtgtggttaagattttcggtttgcgttgatttttttgtttagaacgtgtttatatatgtttatgttttttattttgttgaaatttaattttttttttaaaggttattgtagggagtttttttagggtttaatcggatttagtgtttatttgttttgttttgtataaagcgttttttttgtttttttcgtgtgtatttagagaattttgattttgattgaattatttgtgtatttgtttttttttagttttatttttatatggtgagtttatcggttttatttatttttgtatgaggtaagggtttcgtttatattaggtgttaattagtgtttacggttattatatggtaataggggttattggaggagtgtttaggagtaagggagttttttttatttcgtgaaattatattattgattatgttacgaaataattattttttttttggattttaagagtggaatcgagataacgggtcggaaaagagttttagagagttataaatttttgaggagtgatagtaggaaattgcggtttttaggatttagtgagggagttgagtaaattttttagcgggtagagacggagataggtaggtagacgaagaagataaagagttagttagatggaaaagttagggagaaaaatagagatagtagtagagtcgcgggttattagggttagtttttgaaggtttgtttttaattaggtgtttttgttttaggaattgaggttgcgattgcgtttattaaatggttatatatttgagattggtgataatcgtatttatttgttattaatttgttgcgtaattttgggtaatttttttttttacggtagggtaggagagttgtacggaatggtttttagagttcgattttaattttatttttatattttttagttgtttataaaggtagagtagttaagatataagtaggttttgcggatatttaaagtagtgattttgtttcggtttagttttaggaagttgggtttttatatttcgtttattttattttcgggttttaggtgttagaaattttttattagcggtttcgcgggattttgtttagttgtttcgtgttttttggtggttaaggcgtgttattgtagtgtcggttttttgttatttttttttttttgttcgttagattttttggcgttttgtttacgatttaaataggagatagtgttgatttatttttaagcggtttttttatatttatatttgttttatatagatgaggtttttcggatagtttttgtttagaagtttaggtggatgtttgagacggtagttagatatttggaagttattttaaaagtttagggatatgggtattcgggagataggaggcggaaagattatttgagtttaggagtttgaggttgtagtgagttatgatcgtgttattgtattttagtttggacgatagagtaagattttgttttaattaattaattaatgtaagtttagagataagggtaggagaaaattaggggatagaagtgagggattggttattgttaagttttgtttatttattttttttttttaggtcgtttaggggaaagagaaatggttttattgtgggggttataggtttagtttaagttttgatattgtttttggtttattgtgtgattgtcgattttggttgagtggtgttacgaatttgagtttaaacgtttttagtagaaggattttttttattatgtttcgttttataaaataagttttgaggtattttgttttagtaaaatgtattaaataatttattttttttgttgtattaattggatttataagtgtttttcggtagtatgattagtatgcgaggatttacgttattatattgggtttaggttattttggatttgttatttataatgggcgtgtgtatattttttgttggggggtgtagattgaaattttgaagtattcgttgtgcgttaggtgtttttcgtatattattttatttaatttatataataattttaggagttggaataagatgattttattttatagaggagaatattgagatttaaagtttgttaaatttatataattagtaaggggtggggaggtatgacgaatataggtggttataacgttaaattttttttagaagttttaattatttttcgataattttgagagttttaatattttatttttatttagattagttttagtttttttgtttattttttttttattttatatttagtttatttgttttattttttaattttagtaggcgttagaagtttattttttttttatttttgattttggtattttttttttttgtttttaaatgttttgtggattggattttttttaatttttgtttatttatttatttgagatatagatttattgtcgttaaggttggagtatagtggtattattatagtttattgtagttttatgtgatttttttatattaatttttttagtaattggggttataggtgtgcgttattgtgcgtatttttttgtattttttgtggtgatggagtatgtttgatatttgattcgaattcgagttcggtattttaaggattggaatgggtaaagaattttttagtattgtatagtttttttaaagtataaagtttgggagaattaatatatgtaggataattgaacgtaagagatttgtggaatgtagttttaatttgataattgtgtgttaatcgggagtaataggataggtcgttacggttggttatatttatttatgttagatgtataatgtttggagttttttttattgatgagaagtaatttatgattttg

SEQ ID NO: 158 - DNA, 1334 bp, Artificial Sequence
  chemically treated genomic DNA (Homo sapiens)
aagtgatttttttgatttaatttttagagtagttaggattataggtattcgtattatgtttggttaatttttgtattttttttttttgtagagacggggtttcggttatgttggttaggttagttttaaatttttgattttaagtgattcgtttgttttggtttttaaagtgttgggattatagcgtgagttattgcgttaggtttataattttattattaaaattaattttattgtaaaagaattagtttaggtttagacggaatgggttttatgagtttttttttttttttttgtaaggttacggtggttatttcgtgagttattgttgttaggttaagttttttttcggttattttttattatgaattatttttgtagtgagtatagtatttattttggcgggagggttttttagatatgagtaggatttggattaaggttaggttggaggagatttttatgggaaagagggattttttgaattttagattttttagttaagatgattttattatatgtcgtttttgtttattagtaaatttttttatgtagtttgattatgtttaggaaatatttttgataaaaattagtggagattattgttttagaggattttcgggtttttttaggtaaatgttatttaacgttttttaagtaaatagagtttgttttataaaattcggggttcgggcggttttttatttttgattcggggtcgtttttggagtagagaggaggtaatggttattatggagaataaggtgatttgcgttttggttttggtgtttatgttggttttcggtattttggtcgaggtttagataggtaaggtatgtttttttttgttttgtggggttatagttagttttggtagttttcgttaggagttattgttttatatatatatttttgagtatttgttttgtgttaggtgttgttttaggtttttaaaagtatatttaatttataggatcggtaaaagtaggtggagagtaatttagggtggtagggttttcggagattttcgagaaatgcgacgaggagggggttgtttttagtcggggttgtttttttgtgttaggaagattatataatttttttaagtgttatgttttaaagaggaagtgttggcgtggggttttagaatagtgtttttgattgtttatgttaacgttttttttaggggtagatttttttagggtttatttagataggtttaaatgtcggttttagtgatggttatttaggagatttttttttataggttcgaatgtttattttagtggtggttaattgggagatttttttttataggtttttgggtttttttt

SEQ ID NO: 159 - DNA, 1334 bp, Artificial Sequence
  chemically treated genomic DNA (Homo sapiens)
gaggggagtttaggaatttgtaggagagggttttttagttggttattattgggatgggtattcgggtttgtgggagagggttttttaggtggttattattgggatcggtatttgggtttatttggatgggttttgggagggtttgtttttggggaggacgttggtatgaatagttaaaagtattattttgagattttacgttaatattttttttttgaaatatgatatttgggaggattgtatagtttttttaatataggaaaatagtttcgattgaaggtagtttttttttcgtcgtatttttcgaaggttttcgggggttttgttattttgagttattttttatttgtttttgtcgattttgtaaattggatatatttttaagggtttagaatagtatttggtataaaataggtgtttaaaaatatgtatgtaaaatagtggtttttggcggaggttgttagagttggttgtggttttatagagtaggaagaagtatgttttatttgtttgggtttcggttagggtgtcgagggttagtatggatattaggattagggcgtagattattttgttttttatggtggttattgttttttttttgttttaaaggcgatttcgagttagggatgagaggtcgttcgagtttcggattttatagggtaggttttgtttgtttaaagagcgttagataatatttgtttaaggaggttcggggattttttgagataataatttttattgatttttattaaaggtgttttttagatatggttaagttatatggaaggatttgttgatagatagagacgatatgtggtgaggttattttggttgagggatttgagatttagaaagttttttttttttatgggagttttttttaatttgattttaatttaggttttatttatatttgagaggttttttcgttagggtaaatattgtatttattgtagaagtgatttatagtgagagatggtcggaaaaaggtttggtttgataatagtggtttacggggtggttatcgtgattttgtagggggaagggaaggagtttatgaagtttatttcgtttaggtttaagttaatttttttatagtggaattggttttaataatgaaattgtaggtttggcgtagtggtttacgttgtaattttaatattttggaggttaaagtaggcggattatttaaagttaggagtttgagattagtttggttaatatggtcgaaatttcgtttttataaaaaaaaaaaatataaaaattagttaggtatggtgcgggtgtttgtaattttagttattttggaggttaagttaggagaattattt

SEQ ID NO: 160 - DNA, 6432 bp, Artificial Sequence
  chemically treated genomic DNA (Homo sapiens)
tattacgtttagttaattttcgtatttttagtagagatagggttttataatgttggttaggttggtttcgaaattttgattttatgatttgtttgtttcggttttttaaagtgttggaattataggtataagttagtatgttcggtttatattttttaattgtatgtataatttaatttgtagatgattttaaaagtttaaattggagttttattgttttttttatttttagtttttataataaattttatgatagtttttgtttataagaatttttttgtagttttattatttgtaaattatttaattttgttttttcgtgattttttattttttatattttttatattttttagttattgttttaaaaattttggataataaattaatttaaatttttttttaaacggtatttatttatttttatttagatttatatggattggttagaggtaggtttgagattggttgatggaggtttggtttagatttaattaggaggttggtttatatttgttttatatgtttttttttttttttgtatttgttggtttttaagtgtttttaattgaaaataattagtatattaaagtagtatattttggagtggtattttttgaaattttttattggttaggtggcgaagattaattatttgattaatttgttttagagtgtagaataagtttggaattagataggattaagtttaaatttgggttttgttttttattagttatgtgatttttgttaaatatttaatttttttaatttttaaattttttatttgtaaagggaagattagaatagtattgtaaggatatgttttaaaatttaataaggattatttttggataatagggttaagaatttttttaaagtttgtttttaaaaaaaaaatttaaattttttatttataattaatacgtattatttttgtaatttttaaaaagttattttttttaaaatatattattgatgttttttgtaaatatgtggtataattgtaggttttattaatatttgtgaagaattgtaaataagagaatggattaggaaaattgatatttttatttttttttttattgaagataagaaatatatattgaatattgattatttgtagagtacggagtgtggttttatattgaaaaaggaatattttgtgtttttaagggttttataattattagggtagaattttaaaaagtaaataaataataataatgtattttatgttagaatggggtaaatatttttttttaaaaaaaggttaaataaacgaaatgttttttgggttatttttgggaaaggagtgattatagtaggtgaagtattataaaatattttttggaggaggtagtattatggatgatttataaagggtggatgatttttataaattaattatagttttagtgtttattggtttgttttataataaaaggaaaattggttaagagataagagttgagaatgaggttggttaatttataaggagaggaatttttttgttaattgttttagttgatagtaattttaatagttgtatgttataaagtttaggggagtaggaagttttttttttattataattgagaaatttaacgtttaaataaattataatttgatttagtttaattgtgtgtgtttgtgtgtgcgtgtagagtttaaaaagttggtaaaatagattgttagtttttaaaatttttgtttaagttgatatttattgttttttaatttattaagggtttaaacgttattttttttgttttttaaattttgagtcgggttattatttttttgtttttatttgtaaatggtttagttttttatatgtatatattaattgtttatgtgaatatataaaatattatattaagttaaatatataattatgtgtgaaaatgatgttttgattaagggtattagatattttttttaataagaattttaaaaggaagggtattatgataattttttttttttttttttttatttattttttgtttttgagatagggttttattttgttttttaggttgaagtgtagtggtataattatggtttattgtagcgttcgttttttgggtttaagtgatttttttattttagttttttgagtagttggtattatagatatatgttaatatgtttggtttttttttttttttttttttttttagtaaagatgaaattttattatgttgtttaggttggtttcgaatttttgggtttaagtaatttttttatttagattttttaaagtgttgggattataggtgtggattattgtatttagtttgatgaatttttaaaattattaaattgtaatatgtatgagtttatatatttattatttttattatgatgatttttaaaaggttagtttgtatttggtaatgttgaattttgattttttttaattttataggagattggagattaaattagaaatgttaagggtaaataaaattaaaattaatattaatgatgtattatggtaaagattattagttaaatattttattatagatttaaatatttagtttttaataatgtaaaatatttttgtgataattaaggaaaataaagtttttggaatttattggatatttatttgttatattgtgtttttaggagaaagaaagtatatgtttgttatttggaggaatttgggtaaatgtaggaaaaaaaaaagaagaagaaagaaatttatatatttttttatttttaagaaaaggaagtagtggtgatattattttcggttaaaatgtagtttgtttatattttaaatattcggtaataatgttttttttagagttatgaagtaattagaataattaaatataatttttttttaaatttttattgtttgatttatttatttatttaataaatatttattaaatatcgattatgtgtttgatgtttagggatataatagtaagtggagggaaagatatataatatttgtttttaagaaatttggagttgagtggaggatagaaatataaattaaagaatgatataaataattataaagttatagttgttaaaagaaaagtatatggtgttaagagaacgtgtaatataagatttatttatggaggtgagggaaagtttgtttattaaagaagttatgatttaatttacgaagattaggagttggttgggtgaagaaaaaaaggttagaggaaggaagtttatattggggaaggttttaagtataaagggtaggaggattatagaggtatatttacgaaatttggagaaggtttttagtaagtaaggagaagttaaatgaaagtttacgggagagttggaggtttgaagatacgtttaaggatttggtttttattttttttttattttaagagtagtgggaagttattaaatgattttaattagagggttggtataattagttttgtattttgaaaagttgaatttagttttcgtttgagaaattgagtgaaagagtttagaacggtcgtggttgagggtgattcgtgggagatttttatataagttatggtagtggtatgggttggtggtagaagagggaatagggagaagatttggaatttaatttttttttattgataaagttattttagttttggtaaggtaattaattggtgggaaagaagatgtttagtttttttgattttattgtattttttgtatttttaatatgagtattgggaagtggtaaaatatttagaggtagtttgggtgttaggtggagtatgagttaaaattttaggatgaagtaaatgaatatttagaatgataggaaagatttgggagttgggtttgggggagggttatttatttttattttttggagattttggtataaatttttgtttttgtaattttttttttaggtaaaggaatttattaaatgaattgttagaagatttattgattagagggttgtatagaattatatttttgagagtgggaagtaggttgattatatagtttattatttaattaggatatatttgaaagagaaagggggttttattaatatttaaattataaaatatgtatattaggaatgttttgggtaaatttggttgttttagtaagaaaggaaatttgaaagtttatattgttttgtttttatgttatttcgtttgtatatgagagggtaagtattttttttttttatttgtattaagggaataaaagtataagtatttaggtgatttttaatttatttttaattttatagtttttgttatattttatatattttgaaaattatattttttattattattatttcgtgataggtgattatttataattatttattgatttagtttcgggaagaggcggtgtaaaatgggacgttttatttaggtgtttattagaaatgtagaatttttgtttgttttttagatttattgaattagaatttgtatttttaaataagatttttaggtgattaatatgtatattaaaatttgagaaaaatttttagatttcgatttaaagaaaaatattttataatttgatagtgtatgtatatatatatatgtatatagatataattgaagtataaatttaatgaagtagaatttatcgttattattttatttgggaaagaaatgtgttcgcgatttaatagattggagtatttatttttggattttaatttgtaatttgaaaacgtatttttaaagtatttaggagtaatttgaagaaagttgaggggaggcggtagatgttttgatttattagggaaaacgtggacgttttttgttgttattttgtgaattgtgtgtatttagttatttttgagtaaatatttggagcgaggaatttttgagtggtgtgggagggcggtgaggggtagttgaaagtcggttaaagttttcggaggggttggtttaggaaatatgattggtagttacgagagagttaggggttggacgtcgaggagagggagaaggttttcgggcggagagaggttttgtttagttgttggcgaggagttttttgtttttttcgtagcgttgagttgaagttgagtgagttattcgcgcgtacggagcgacgatattttcgcgcgtgtattcgttcgggataggagtcggatttttgtgtagtttttttcggtcgtcgggggttttttcgcgtttcgtcggtttttaggtttttttttggttggcgagcgggcgttatatttggttcgtatatttgcgttgtcggttcggcgcggggttcggagagggcgcggcgcggaggcgtagttaggggttcgggaaggcgtcgttcgttgcgttgggggttcggtttatgacgagtagcggggtttgttatgggtcgggggttgtttaggggtttgtggtcgttgtatatcgttttgtggacgcgtatcgttagtacgattttatcgtacgtttagaagtcgggtgagtggtttttagttcgggttcggcggggcgtcgggggtttttttggggttttcgttttttcgttgcgtttgatagtcgggttcggtaattcggttttcgggcggaaacgaggaaagtttttttcgcgatatttacgtagttcgattttcgtagttgtagggattgtgagttttttttgaaaaagagaaggaaagtttagttgtaaggggcgcggggtacgtttggttttttttgtgcgagtaggaaaggcgttgtgttggtcgcgttcgaggcgagtttttattttcggaaagggaagtttgagaagttggttatttgaaggcggtcggggagtagcggttcggagcggtagtttgagttgttaaagtagttagcgtatttgggttatttcgtttatggcgatgtcgcgtgtttatttagttttttttgagttattcgtttaaaaggttagttttttagtttttagtttttggagacggttacgtttttttttaggtcggttttttggttcggagtttttggaaataagttttaagaaaataatcgatttttaaaagaaagttagttggttttattgacgttttggtatggatggatagggagtggagatgtttaggtgaaatcgagaattttttattgaatgtttattgggtgttagaggttgtagattttgtttggaataagatagttttgtttttagggagttgatggttttatgtaattatcgtttgttggaaatcgaagggttaaaattttaattaggttatttatttgatcgttgtttttgaaggtttttaaggaaaaaataaaaataaaaaaatatatatatatattatatatatataaatatatatataattatatatataaatatatataatattaatatatatatgtatgtaggaatgggggtttttaattatttgttatggaaagtgtaaaatttttgagattttaaaagttagattttttttttttggagacggagtttcgtttt

SEQ ID NO: 161 - DNA, 6432 bp, Artificial Sequence
  chemically treated genomic DNA (Homo sapiens)
agagcgagatttcgtttttaaaaaaaaaaaatttaatttttgaagttttagaggttttatattttttataataaatagttaagaatttttatttttgtatgtatatatatattaatattatatatatttatatatataattatatatatatttatatatatataatatatatatatatttttttatttttattttttttttaaaaatttttagagatagcgattaggtgggtagtttagttaggattttaatttttcggtttttaataaacgataattgtatagaattattaattttttgaagataggattattttgttttaggtaaaatttatagtttttagtatttagtaggtatttagtgagggattttcggttttatttgagtatttttattttttatttatttatgttaaggcgttagtggagttagttaatttttttttggaaatcgattatttttttgaaatttgtttttaaaaatttcgggttaagaagtcggtttgagggaaagcgtggtcgtttttaggagttaaggattgaggagttggttttttgaacgggtggtttaaaaagagttgggtgggtacgcggtatcgttatgggcggagtggtttaggtgcgttggttgttttggtagtttaggttgtcgtttcgggtcgttgtttttcggtcgtttttagataattaattttttaaattttttttttcgggggtgggggttcgtttcgaacgcggttaatataacgttttttttgttcgtataaaggggattaaacgtgtttcgcgttttttgtaattgaatttttttttttttttttaagaaaaatttataatttttgtagttacgggagtcgggttgcgtgagtgtcgcgggggaaatttttttcgttttcgttcgggggtcgggttgtcgggttcgattgttaagcgtagcggagaggcggggattttaggaagattttcggcgtttcgtcgagttcgggttggggattatttattcgatttttgaacgtgcggtgggatcgtgttggcgatacgcgtttataggacgatgtgtagcggttataggtttttgagtagttttcgatttatggtagatttcgttgttcgttatagatcgagtttttagcgtagcggacggcgttttttcggatttttggttgcgttttcgcgtcgcgtttttttcggatttcgcgtcgggtcggtagcgtagatgtgcgggttagatgtggcgttcgttcgttagttaggagggggtttggaggtcggcgaggcgcggggaggttttcggcggtcgagggaagttgtataggagttcggtttttgtttcgagcgggtgtacgcgcgggggtgtcgtcgtttcgtgcgcgcgagtgatttatttaattttaatttagcgttgcgggggaaataggaaatttttcgttaatagttgggtaggattttttttcgttcgagagtttttttttttttttcgacgtttagtttttagttttttcgtagttgttaattatgttttttagattagttttttcgagagttttggtcgatttttagttgttttttatcgtttttttatattatttaggagtttttcgttttaagtatttatttaagaatgattaagtgtatatagtttataaagtaataatagaaaacgtttacgttttttttagtagattagaatatttgtcgtttttttttagttttttttagattgtttttaggtgttttagagatgcgtttttaaattgtaagttgagatttaggagtgaatattttaatttattgagtcgcgagtatattttttttttaaataaaatagtaacggtaaattttattttattaaatttgtgttttagttgtgtttatatgtatgtatgtatgtgtatatattgttaagttgtaaaatgtttttttttaggtcgaagtttagaggttttttttaagttttaatgtatatattgattatttggaaattttatttaaaaatgtagattttaatttagtaggtttaggaggtaggtagagattttgtatttttaatgagtatttggatagagcgttttattttgtatcgttttttttcgggattgagttagtgagtaattgtaaatgattatttattacgaagtgatagtggtgggaaatgtaatttttagaatgtatagagtatagtagaaattgtaaaattaaaagtgggttgggagttatttgaatgtttgtgtttttatttttttaatgtaggtgaagaaagagaatatttatttttttatgtgtaaacggggtaatatgggagtagaatagtataaatttttaaatttttttttttgttagggtaattagatttgtttaagatatttttggtgtatatgttttgtagtttaaatattaatagaatttttttttttttttagatatgttttgattggataataaattatgtgattaatttattttttatttttaaagatatgattttgtatagttttttggttagtagattttttagtaatttatttaatgaatttttttatttgagaggaagattgtagaggtaagggtttgtgttagggtttttagggaataaaggtaaatagtttttttttaaatttaatttttaaattttttttgttattttaagtgtttatttgttttattttggaattttaatttatgttttatttagtatttaagttgtttttggatgttttgttattttttagtatttatgttgaagatgtagaaagtgtagtgaaattaggagggttaggtatttttttttttattaattaattgttttgttaaagttggagtgattttgttaatggaggaagattgagttttaaattttttttttatttttttttttgttattagtttatgttattgttatggtttgtgtaggagttttttacgagttatttttagttacggtcgttttgggtttttttatttagttttttaaacgagagttgaatttagttttttaaaatataaaattagttatattaattttttgattaaaattatttaatggttttttattgtttttgagataaagagaagataaaaattagatttttgaacgtgtttttaagtttttaattttttcgtaaatttttatttggtttttttttgtttattgaaagttttttttaaatttcgtgaatatgtttttgtaatttttttattttttatgtttagagttttttttagtgtggattttttttttttgatttttttttttttatttagttaatttttggttttcgtggattgaattataatttttttgatgggtaagtttttttttatttttatgagtagattttgtattatacgtttttttggtattatatgttttttttttaatagttgtaattttataattatttgtgttattttttaatttatatttttattttttatttaattttaaattttttgagggtaggtattatgtatttttttttttatttattattgtgtttttaagtattaaatatataatcgatgtttaataaatatttgttggatgaatgaatgaattaggtaataaagatttagaagaaaattgtatttgattgttttagttgttttataattttggagaaaatattgttatcgaatatttgagatataaatagattatattttagtcgagaatgatgttattattattttttttttttaagaatggagaagtatgtgggtttttttttttttttttttttttttttatatttgtttaagtttttttagatagtaaatatgtatttttttttttttgaaaatataatgtggtaaataaatgtttaatagattttaaaagttttgttttttttaattattataaagatgttttatattgttggaggttagatatttaaatttatggtggaatgtttaattggtggtttttgttatgatatattattaatgttgattttaattttgtttgtttttaatatttttgatttaatttttagttttttgtgaaattgagaagaattagaatttagtattgttaagtgtaagttagttttttgaaaattattataataaaaataatagatgtgtaaatttatgtatattgtaatttgataattttaaaaatttattaggttgagtgtagtggtttatatttgtaattttagtattttgggaggtttagatgggaggattatttgagtttaggagttcgagattagtttaagtaatatagtgagattttatttttattaaaaaaaaaaaaaaaaaaaaaaaagttaggtatgttggtatgtatttatagtgttaattatttaggaggttgaggtgggagaattatttgagtttaggagacgaacgttgtagtgagttatgattgtgttattgtattttagtttagaagatagaatgagattttgttttaaaaataaaaaataaataaaagaaaaagaaaaaaaaattgttatgatgtttttttttttgaaatttttgttgaaagggatgtttgatatttttaattaagatattatttttatatatagttgtatatttggtttagtataatattttgtgtatttatataagtagttaatatatatatgtaaaaaattgggttatttgtaaatgggaataaaaaaataatagttcgatttagggtttaaaaaataaggaaggtaacgtttaagtttttaatgagttgaaaaataataaatattaatttgaatagaaattttaaaagttgataatttattttattagttttttaaattttgtacgtatatataaatatatataattgaattgaattaaattgtggtttatttaaacgttgggttttttagttgtgatgagagaagaattttttatttttttgagttttgtgatatgtagttgttgaggttattgttagttagagtagttaatagggagatttttttttttataaattaattagttttatttttagtttttattttttgattaattttttttttattgtgaagtaaattaataagtattgagattgtagttaatttgtgagggttatttattttttgtgggttatttatgatgttattttttttaggaaatattttgtgatgttttatttattgtgattattttttttttagggataatttagggaatatttcgtttatttagtttttttttaaaaaaaaatgtttgttttattttaatatggagtatattattgttatttatttgttttttagaattttattttaatgattgtaaagtttttaaaagtataaaatattttttttttaatgtagaattatatttcgtgttttatagataattagtatttagtgtgtgttttttgtttttaatagagagaaaaataagaatattagtttttttaatttatttttttgtttgtagttttttatagatattaatagaatttgtaattatgttatatgtttatagaaagtattaatagtatgttttgaaaaaaataattttttgaaaattataagggtaatacgtgttaattataggtaggaaatttagattttttttttaaaggtagattttaaaaggatttttaattttattatttaaagataatttttgttaaattttggagtatgtttttgtagtattattttaattttttttttataaatgaagaatttgaggattaaagagattaagtatttgataaaggttatatagttagtaaaagatagagtttagatttgaatttagttttgtttagttttagatttgttttatattttagaataaattgattaggtggttgattttcgttatttgattagtgaaggattttaggaaatgttattttaaaatatgttgttttggtatattgattatttttagttgaaggtatttaaagattagtaaatgtagggaggaggagagatatgtggaatagatgtggattaattttttgattgaatttaagttagatttttattagttaattttaagtttatttttagttaatttatatgagtttgagtaagaataagtaaatgtcgtttaaggaaaaatttgggttggtttgttatttagaatttttgaggtaatagttaagagatataagggatgtgaagggtgaggaattacggaaaagtaaggttaaataatttgtaggtggtaaaattataaaggggtttttatagataaaaattattatgaggtttgttatgggggttgaagatgaggaagatagtaggattttaatttagatttttaggattatttataaattaaattgtatatatagttaaagaatatgggtcgggtatgttggtttatgtttgtaattttagtattttgggaggtcgaggtaggtagattatgaggttaggatttcgagattagtttgattaatattgtgaaattttgtttttattaaaaatacgaaaattagttgagcgtggtg

SEQ ID NO: 162 - DNA, 7309 bp, Artificial Sequence
  chemically treated genomic DNA (Homo sapiens)
atgcgattaatggtgttaattgttttttggattgtttttatagtataggataagattatattagttttagtaggttttattgaagaaagtttatgtgttttgtagaaataagatttttagtttagtttaataggagattaattatatgtttattttatttttttttaaggtatgatagtatttggttgagatgtttgtgtgtattttttgtgtgaagttgagtatgtaatttttaaagaaattataaaggagttattcgtttttaaaggaaaaatatatgaattttacgggtataaggaagatattaaaatagggttggggagaagtttttttttttttattttatagtattttttatagaaataattgattgtttgaatatatggttattgaaatatatatatatatatatatatgtatatgaaaataagagttggaatatttgattttgttttttattttttattattttagataatataggatataatatggttttattgtatatatgtgttttttggtttaaaaatattgagagtagatttttgtggaaagaaatatgaaaatttgaggatttatgcgaatgtagttagaggcgaatgtagttagaggggtttttaatttgttggtagagttgggggagagttggggtaattttattgttatgaaattggttttagatggaggtaaggaaaggtgtttattttttgttggtgttagatatagagagattttgtagtatttcgtattttaggtttagaattgtttagtgttgggtagtagttttattgagggtttggttagagtttatggggatgggtggattaggttgtttgttgtttggaaaaggttattttgaatataatgatttttatatggacggtggggtttgggggaaggtatcgtggttagggtttggaggggaagagggaggaaagtaaagaggagtttttttatgaggtaatagaaatgatagtattttttttaggttgaatttttaaaatttagttttgttttggaagattgggattgtggtattttttgtagtgtttttagatcgttttaaggtttttaaattaatgatttataattatgttgtttttttagagagtatttttttttttggttgatatgtggttagtttaggggtggaggagtttcggtagttacgaatttagacgggatgttgattgagagttttgtggttatggtagatgggaggggtgagttttatttatttaaaggtattcgtattttatcgatgagtgtggaattgtgttttttcgttttcgtagtgagacgatcgattaggattgtaggttgagtaaatgggtgttttttggtttatagcgttttttagtattagttagcgggatagagtttcgtgaattttttaaggagttattatttgtttgtttgaatgttggaaaggggtcggtggtgttgattattggatttatttaattaatatttattaaattcgttgttattaatatttaatttttgtgttttaggggtttagattttagtaagggaaatagatgggtaaataattatattagagttagttaagtattgttaaagaagttgatatagggtgttgtggggatatatgggaggggaattagaggaggtttttcggaggaggtgatatttaagttgaggtttgaaggatgtggaagagtttagtaatttttgaagattaaaaaaatggtgataaaaaagatatttttttaattttttagtgttacgatttaagagataaataagtaggtgaacgtataattatattgggttttattataagttagagtttgttttttttaggattttggtattataattttttttgaaattttgttttcggtattgatttttgggggaggtagtaatataggaatttagtgttcgttgcgaaattgatggatggtttttagttttgggtacgtttttatgtgttaaatttgtttaaatggtaggatttattttttttttagaagtatttatttgttttataggattttttatggaattttggagtttttgaggcgagagggattttggatattattgagttttattttttatttaataaatatagaagtggacgtttggataggtaaagtgatttgattaaggtaggtgtatagttattttgtaatattgggaataaattttaggttttttgattttttgtttttattttattttttttttattttttagaaataaagtttttatgtgtttttttttatagtgatatgtttggaatgtattagttagtaatttaggaagggaaaaaaataaatatataagagataaatttgttaggaggataaatttgtattgtttttgattggtttagagggtgattattattatggtagagaattatttaattagtgtaagtaaaatttttttgtgggttgggtattgtataaagatttaaacgaatttgtttatagatttgaaaagtagatacgagatttgtgaatggttggggtttttaagtttatagtataagtatgggttatattttatagtttggaggattgagttttgaaaatgggtaagtttttttatttttttgaattttattttttttatatttaaaataaggatgagtagtttttgaggttttttttacgatttttttttttatagattttagtattttataatttgatataaagagggtggatatgaatttattttttttagaaaagttttaggaaagagaatattaggttattttagtaggtgtgtagataggttagatagattttgaaatttatttagttttttttagatgtataattttattattgtttttagttgttaagagaaagtaggagagtttgtatttttattttttttttttttttttttttttttggagacggagttttattttattatttaggttagagtgtagtggtatgattttagtttattgtaagtttcgttttttaggtttacgttatttttttgttttagttttttaagtaattgggattataggcgtttattattatatttggttaattttttgtgttgttagtatagacggggttttattatgttagttaggatggtttcgattttttgatttcgtgattcgtttattttggttttttaaagtgttgggattataggcgtgagttatcgtatttagtttgtatttttatttttattgttagttttaggtttattttatttagtttattaagtgatgttgaataattaatttttatatattattaggtttatggatattatgatatttagattgatgggtgtttgttgaagggggtgattttagtaggaggatttttttacgtaaggatttatggagtttgttgttttttttttttagggtgagaattaaattgtttttatacggtgggtagaggggaattgatttaggtttggaataagagagaatattttaattgaaaagtttttggaattcgttgaattttaagatattgtgtggattagtttaggatagggagtgagaagaaattaattaaaaggtaatttcgttattttttagttggaaaaaagattagattatatttgtgtttttataattaagtagttgttggaaaaaaacgttttagatgttttttatgagaaaattgttgtttgaagtttagtagaagttatttatttgatatttatattttaggtaaggtttttcgttggagaaaatatcggtattttggataaaattgaaatgtgaaaagaaagggaagagagggtttttattatgtaagatgtttatttaaagtggatttggtttggaaagttttttaaaattttttatatgattgtggaataagttatgtggggcgcggggataagcgaattttttaaattttattacgtatgtttttatttaatttggatttttagagtggtttttagggtattttgtttaggatttagttagttgttggttatatttatgttttttagttttttgagattttatttggttttgagagggttaaaaagtagtgtggttaaatattttaggttttaaagtatttttattgtggttggggaagtaatagaattatattttataaaataatgaaaatagtgttagaaaaatatcgagagatagaaatatttttacgagttaggttatagttagagtgaaggtagggaaggtttttaaagttgggtggaggggataagttaaaaagatgtggaaattggttttttttttttatggttaaagtgtttaaaggggaaaaaggagttttaaaaatgtttttggaaatattattttttacgaatttttcggtttttgttgttttaatgttatttgtttgagatgtaaatagaggagttttgagaaagaagttgaatttgtatttttttttgtttttatttgttttaaatttgtggtatttttaataggatgaagcggaagagaaagggaaagagataaaagtgtagaaagatggaagattttagttgtaaatggttatttgtagttagatggaatagttgttgacgtttagggaaatgtatgtttttttttagatgggaaggagtagtggaaaggggtgacgagtttttggttggttattaattattttatttttttgtgtcggttttttatttggaaagtgggagtgatatttgtgtttgttttttttatttataaagattattgtgagagttataatacggtgagatatagaattttgtttttaaaaatataaagtagaattaagatgttaataataaggatagtaattgtgttagttatttgtaattatttattatagttagtcgtttaggattttggatcgtttttttggttttattatagttttggattagtttatttttaaattttttgttgaagggtggagttttgttagttatgggtagggaattatttttttttgtttttttattttttgttttttaaatatgtttagggtttttgtatttgttgttttttttgtttggtattttttttttgtggtttgttttagagttgatttttgtttttgtttattttttagcgaggatggtattttagggagttttttttttattatcgtagagagagtaggttttttttagttatgtttaatttagaattttgttttgttttttttatagttttagtattatagaaaattattttgtgtatttatggatgtttacgggggtaagggttttgtgttgtttaatttagtattttgaatcgtgtttgttgaatgaatatagaatttcgtttgttttgggagagtatagaaaatagttttttattatatattatagttagttgtaaatagtagatggttttttatattttagagagtaagaattagagagagagagaaagagagagagtttgggttttttttttttgtgtttgttttttttagagaaattggaggggtagtagttagtattttttcgttggttttattaagtatagttaaggtttttaggatatggttattttttatttgtggaagcggttttgttggggtgggtgggtgttagttggttttggtttgggttagagatatttagtggtttaggtgggcgtggggttagggcgtagacgagaaggggtacgagggtttcgtttcgaggatttagcggtaagtatcggtttcgggcgcgttttagtttatttattcgcgtgtttacggcggtattattttttataaggatttgaacgattcgggggcggtttcgtttcgttattttttgttttcggtttcgttttttttttggagggtcgatgaggtaatgcggttttgttattggtttgagggggcgggttttaatagttcgaggcggggttttcgggggtttagcgttatattattcggtcgtttaggtagcggcgtagagcgggtagtaggtaggcggcgggcgtttagacggtttttttttttttttttgtttttttagtttttgttttttcgtcgggaggtcgttcgtcgagttttgcgttagcgtcgaggtagtttcgttgcgttttatttcgtttcgtcgggtattcggagggtagcgcgtcggaggttaaggttgtttcgtacggttcggcgggcgagcgagttcgggttgtagtagtttcgtcggcggcgcgtacggtaattttggagaggcgagtagtagtttcggtagcggcggtagtagcggtaatgattttttggttcgggtttatcgtgtttttgggtagttggagtttgggggattggggcgtcgaggcgtgtatatgttcgtttagttatttttaggacgttttttgtaatttcgatatcggtaagcgtttttggtgtttcgttcgagttttacgttgtagttaggattgtagcgttgtttagggaggtagggcgagttttattttttttttttgttttaggagaggggtagacggggttggggcggagtggagaaattcgatgtttttgggcgggggcgttggtatagttgagaggggaagatgttttgtagaggaaatttatagtggttgagggagtttttggtcgtttttgtttttttaatttaggtcgtgaggtttttatcggtttttttgatatttggaaaatgtttttatttattattaacggaggaagggttagaagagaagggtggggaaagggtttttaaaatttggaatgttaattaaagtgttgggaaattgaatagttaaaaaaaaaaaaaaaagttgttcgttatgtgtacggaaagttgtaggagaaatttggagtatttcgagtttgtattattttttgcgtttatgaaatttattttttttattgagatttaatttagttgtaggttttttaggtaagcgttaatcgagtttttgggattgttaagtttgggtggatttaagggggaaaatgaggagaaagttgtggtattgatttacgttttggaggtattgtgtttgagagtgttgatagttagtagaaggtgcgaggggttatttattatatagttgtgaaaatttataggaaggttattttttttttttttgaatgtgtgtggggagggggagaatgggtagtggaaaatagatttgttattaaaagaataaatttgttaagggttatattacggtgatagttttagattggatttagtgttttgagtagagagattttgtaaagagattttttattttttagtgtgtatggagggtttcgagagtattttgggaggtttgtttgggagtgtttgggatatttgtgtttggatggttaaaggtggagtggtatttgggaaatatttttttttttttttttagtttataaag

SEQ ID NO: 163 - DNA, 7309 bp, Artificial Sequence
  chemically treated genomic DNA (Homo sapiens)
ttttatgggttggaaaggaggagagagatgttttttagatgttattttatttttagttatttaaatataagtgttttaaatatttttagataagttttttaggatgttttcggggttttttatatatattaaggagtaggaggtttttttatagggtttttttatttaagatattaagtttagtttggaattgttatcgtgatgtgatttttggtaggtttgtttttttggtgataaatttgttttttattatttattttttttttttttatatatatttaagggggaaaaaaatagtttttttgtgaatttttatagttatgtggtgagtgatttttcgtattttttgttggttattaatatttttaaatatagtgtttttagggcgtgggttaatgttatagttttttttttatttttttttttaaatttatttaaatttggtagttttagaagttcggttagcgtttgtttgggaagtttgtagttgggttgggttttagtgaaaagaatgaattttataggcgtaggagatgatgtagattcggagtattttaagttttttttgtaatttttcgtgtatatggcgggtaatttttttttttttttttaattatttaattttttagtattttagttagtattttaagttttgggaattttttttttattttttttttttagtttttttttcgttagtagtgaatggggatattttttagatgttaaaaggatcggtaggaattttacgatttaagttaggaaagtaaaggcggttaggggtttttttagttattgtgagttttttttgtagggtattttttttttttagttatgttagcgttttcgtttaaggatatcgagtttttttatttcgttttaatttcgtttgttttttttttggggtagaggaaaggagtggggttcgttttgtttttttaagtagcgttgtagttttggttgtagcgtggggttcgggcggggtattaggagcgtttatcgatgtcggagttgtagaaggcgttttgggggtggttgggcgagtatgtgtacgtttcggcgttttagttttttaggttttagttgtttaggagtacgatgagttcgagttaaggggttattgtcgttgttgtcgtcgttgtcggggttgttgttcgtttttttaaagttgtcgtgcgcgtcgtcggcggggttgttgtagttcgagttcgttcgttcgtcgggtcgtgcggggtaattttggttttcggcgcgttgtttttcgagtgttcggcgggacgggatggggcgtagcgaggttgtttcggcgttggcgtaggattcggcgggcggtttttcggcgaaggagtaggagttggaggagtaagaggaggaggagaagtcgtttgagcgttcgtcgtttgtttgttgttcgttttgcgtcgttgtttgggcggtcgagtgatatagcgttgggttttcggggatttcgtttcgggttgttggggttcgtttttttagattaatggtagagtcgtattattttatcggttttttaaaaagggggcggggtcgggggtaaggggtaacggggcggggtcgttttcggatcgtttagatttttatagggaataatgtcgtcgtgggtacgcgagtgggtgggttggggcgcgttcgggatcggtgtttgtcgttgggttttcggagcggagttttcgtgttttttttcgtttgcgttttggttttacgtttatttgggttattgggtgtttttgatttaaattagaattaattaatatttatttattttagtaggatcgtttttataggtgaggggtggttatgttttagagattttgattgtgtttggtggaattagcgggggaatgttaattgttatttttttagtttttttggagagagtaggtatagaggagaaagatttaaattttttttttttttttttttttttggtttttattttttgggatatgggaagttatttgttgtttgtagttggttatgatatatgatagaagattgttttttgtgtttttttagagtaaacggggttttgtatttatttaataaatacggtttaggatgttgggttaagtaatataaagtttttgttttcgtggatatttatgaatgtatagggtgattttttgtgatgttagggttatgaagaaaataaaatagagttttgggttggatatgattggggagggtttgttttttttgcgatagtaagggaagggttttttgaagtgttattttcgttgagaagtggataaagataaggattagttttggggtaagttataggagagaggtattaggtagggggaatagtaagtgtaaagattttgggtatgtttgaaagatagaaagtagaaaggtaagaggaagtggttttttgtttatggttgatagagttttattttttagtaagggatttgggggtgagttgatttaaaattgtagtaaaattaggagaacgatttaggattttagacgattagttataatagatgattgtagataattaatataattattatttttattattgatattttgattttgttttgtatttttaaaagtaggattttgtattttatcgtattatagtttttataataatttttgtgggtaggaaaagtaagtataagtattatttttattttttagatgaggaatcggtatagaaagatgggatgattggtggttagttaggaattcgttatttttttttattgtttttttttatttgaagagagatatgtatttttttgaacgttagtagttgttttatttaattgtaaatggttatttgtagttgggattttttatttttttatatttttgtttttttttttttttttttcgttttattttgttagaaatgttataagtttggaataaatagaaatagggagaaatgtaagtttagttttttttttagaatttttttgtttatattttagataagtgatattgggatagtagaggtcgaagaattcgtgagagatggtatttttaagaatatttttgaaattttttttttttttttgagtattttagttataggaaagggaaattagtttttatatttttttgatttgttttttttatttagttttaaaaattttttttgtttttattttaattgtggtttaattcgtagagatgtttttgtttttcgatgtttttttagtattgtttttattgttttatggggtatgattttattgtttttttaattatagtaggaatattttgaggtttgggatatttagttatattgttttttagtttttttagaattaaatagggttttaggagattggagagtatgggtgtggttaatagttgattgagttttgagtagagtgttttggaggttattttaaggatttaggttgaatgagggtatacgtggtggaatttgagagattcgtttattttcgcgttttatatgatttattttatagttatgtggaaggttttagaagattttttagattaaatttattttggataagtattttatatgatagaggtttttttttttttttttttttatattttagttttgtttaaagtgtcgatattttttttaacggaaggttttgtttggaatataagtattaagtagataatttttgttgaattttaagtagtagtttttttatagaaagtatttgaagcgtttttttttagtagttatttaattatgaaagtataagtataatttgattttttttttagttgaaaagtaacgaaattattttttggttaatttttttttattttttattttaagttggtttatatagtgttttgaagtttagcgaattttaagagttttttagttgggatgtttttttttattttaaatttgagttagtttttttttgtttatcgtgtgaaggtagtttggtttttattttaaggaaaagaaatagtaaattttatgaatttttgcgtaggggagtttttttgttagggttattttttttagtaggtatttattagtttggatgttatggtgtttatgagtttaataatatgtaagaattggttatttaatattatttaataagttaggtggggtgaatttgaggttaatagtaagaatgaagatgtaggttgggtgcggtggtttacgtttgtaattttagtattttgagaggttaaggtgggcggattacgaggttaggagatcgagattattttggttaatatggtgaaatttcgtttgtattaataatataaaaaattagttaggtgtggtggtgggcgtttgtagttttagttatttgggaggttgaggtaggagaatggcgtgaatttgggaggcggagtttgtagtgagttgagattatgttattgtattttagtttaggtgatggagtgagatttcgtttttaaaaaaaaaaaaaaaaaaaaaaagaatgaagatgtaggtttttttgtttttttttgatagttaagaataatgatagagttatatatttgggaagaattgagtaagttttaagatttatttggtttgtttatatatttattaggatgatttggtatttttttttttggaatttttttaggaaaggtgagtttatatttattttttttgtattaagttataggatgttagagtttgtaggaagagaagtcgtaaaaaggattttagaaattatttatttttgttttaaatgtgggaaaaataaggtttagagaagtgaaggaatttgtttatttttagggtttagttttttaagttgtaaggtgtggtttatgtttgtattgtgggtttggaaattttagttatttatagatttcgtatttgttttttagatttgtagatagattcgtttgagtttttgtatagtgtttagtttatagagaaattttatttatattgattaaataattttttattatgataataattattttttgagttaattagaagtaatataggtttgtttttttgataggtttattttttgtgtgtttatttttttttttttttaaattattagttaatgtattttaaatatattattataaaaaaaagtatatgaaaattttgtttttgggaaatgaaaagagagtaaagtggaaataaaaaattaaaagatttgagatttgtttttaatgttgtagaatagttgtgtatttgttttggttaagttattttgtttgtttaggcgtttatttttgtgtttattggatgaaagatagaatttagtggtatttaggatttttttcgttttaaaaattttaagattttatggggaattttgtaggataagtgaatgtttttgaaggggagatgggttttgttatttaaataggtttgatatatgggaacgtatttaagattgaagattatttattagtttcgtaacgaatattgagtttttatattgttattttttttaagaattaatgtcgaaaatagaattttagagaagattgtgatgttaaagttttaggagagataggttttggtttatggtggagtttagtgtagttatgcgtttatttgtttgtttgttttttggatcgtagtattaaaaagttaggaaggtgttttttttattattatttttttggtttttaggagttattgaatttttttatattttttagattttagtttagatgttatttttttcgggaaattttttttgattttttttttatgtatttttataatattttgtattaatttttttgataatatttagttgattttaatgtgattatttatttatttgttttttttgttggagtttaagtttttagaatatagggattaagtgttggtaataacgagtttaataagtattggttgaatgggtttaatgattagtattatcgatttttttttagtatttagataggtaggtggtggttttttggagagtttacggagttttatttcgttggttggtgttagggggcgttataagttagagaatatttatttgtttagtttgtagttttggtcggtcgttttattgcgagggcgggagagtataattttatatttatcggtggggtgcgggtgtttttgagtgggtgaagtttattttttttatttgttatggttataaagtttttagttaatatttcgtttgggttcgtggttgtcggagtttttttatttttgagttggttatatgttaattaaagggggagatgttttttggggaagtaatatagttgtgaattattggtttgggggttttagggcggtttgggaatattgtagaggatgttatagttttagttttttagggtagagttgggttttggaaatttaatttggagaaggtattgttatttttgttgttttatagggaagtttttttttgtttttttttttttttttttttagattttagttacgatgtttttttttaagttttatcgtttatgtgaaagttattatatttaaaatggttttttttaagtaatagatagtttggtttatttatttttatgagttttggttagatttttagtggggttgttgtttagtattgggtaattttgagtttaagatgcgaggtattgtaggatttttttgtgtttggtattagtagggggtaaatatttttttttgtttttatttggagttaattttatggtagtaaaattgttttagtttttttttagttttgttagtaaattgaagatttttttggttatattcgtttttggttatattcgtatgaatttttaggtttttatatttttttttatagggatttatttttagtgtttttaagttagaaaatatatgtgtgtagtaaagttatgttgtattttgtgttatttagggtggtgggaaatggaaagtagagttaaatattttagtttttgtttttatgtgtatgtatgtgtgtgtatgtatgttttaatgattatatatttaagtagttaattatttttgtgaagggtattatgaaatggaaggagaagaatttttttttaattttgttttaatgttttttttatgttcgtggagtttatgtgttttttttttaaaaacgagtagtttttttgtggtttttttgaaggttgtatgtttagttttatatagagaatatatataagtattttagttaggtgttgttatgttttgggagggaatgggatggatatgtggttggttttttgttagattgggttggaggttttgtttttgtaaggtatatgagttttttttagtggaatttgttggaattgatatggttttgttttgtgttgtggggatagtttaaagagtagttaatattattgatcgtat

SEQ ID NO: 164 - DNA, 2501 bp, Artificial Sequence
  chemically treated genomic DNA (Homo sapiens)
agttgggattataggtgtacgttattatgtttggttaatttttttattttttatagagataggatttcgttatgttgtttaggttggttttaatttttgaatttaagtgatttatttgttttgggtttttaaaatttcgggattataggcgtatagtgttaggtttttatatttttatatatttttttgtttttttagttgtgaaatggagataatgatatagttttaatttacgtgggatgtttagtatagtgtttggtatttgatagatttttttttttttatttgaaatttatttttgagttgggtacggtggtttatatttgtaattttagtatttgggaaaattaaggtaggtagattatttgaggtgaggagtttaagattagtttggtaaatatggtgaaatttcgtttttattaaaagtataaaaattatttgggtgtggtggtatatatttgtaattttagttattttagaggttgaggtacgataattatttgaattcggtagatggaggttgtagttgagttgagattgagttattgtattttagtttgggtgataaagcgagattgtttaaaaaaaaattatttttaatttaatataaaattttttgaatttttttttttttgagttgtttttttatttgagtttattttatattattgaatagttaattatagaattgtgtattattttttttgatttttagatttttagttttttatagtattttgtttttttttgtcgtattagttatagttgtattttttttttttttttttttgagatagagttttattttgttatttaggttgtagtgtagtagtataattttagtttattgtaattttcgtttttcgggtttaagtaatttttttgttttagttttttaagtagttgggattatatgcgcgtattattacgttaggttaatttttgtatttttagtagagacgaggttttattatgttgttaggttggtttagaatttttgattttgtgattagtttattttagttttttaaagtattgggattataggtatgagttattgtattcggttatagttgttattttatttgtgtgattgattatcgtatgacgtttttattgaagtgtagtgaaggtaggaaatatgatcggtttttataatatttttaatatttattattataggtggtatatagtagggttttaataaatatttgtaaaatgaataaagttaatgagtgtttatgtttgtagttttaattgttttgaagtaaatatttgattttttaatttttattagagtgttttgtatatagtaggtttaattatttttttttttttattaattatttatgttttgtaagaatttagttagttgattttttgtattttataagcgtgatgattgggtgttttcgtgtgagatgcgttattttcgaattttgttacgacgtcggtatattgcgcgtttgatatgaagaaaaaaaaaatttagttagtttattaggtatagtggttaaggtttgtaatttttgtattttgagaggttaaggtaggaggattatttgaatttaggagttcgagattagtttaggtaatatagcgagatttcgttttaaataataaataaaaataattagtcgggtatggtggtgcgcgtttatagtattaattattcgggaggttgaggcgagacgatcgtttgagttagggaggttaaggttgtagtgagttaagttcgcgttattgtattttagttcgggcgatagagtgagattttgttttaaaaaaaaaaaaaatattaaattttagaggggcgaaaaaaaattttatagtggaaatatagtaacgagttggtttagtttcgttttcgttataacggtttacggtgttggaggatttttttgcgtacgcgtatagttttcggtcggttattttcgcgagcgcgttttattttttatcgagcgcgcgcgaagattacggaggtcgattcgggagcgcgtacgtagtttcgtttcgcgttcgattcgcggatttcgcggcgttcggttcgggtggtttggatcgcggagggaatgtttcggagggcggagaattgggacgaggtcgaggtaggcgcggaggaggtaggcgtcgaagagtacggttttgaagaagacggcggggaggagtcgggcgtcgaggagttcggttcggaagagttcggttcggaggaattgggcgtcgaggaggagatggaggtcgggcggtcgcggttcgtgttgcgttcggtgaattcgcgcgagtttttttaggttattttttgtaatcgtagttcgcgcgtcgtgttgttcgtatggtttaatttcgacggcgagtcgtagttttatttaacgttgtcgtttggtacgggtcgtcgtatttatagttatcgaggtacgggttcggcgtttaggttcgatttagtagggacgatagtacggtttgaagtttttttatcgtttcggggtttattttgtagacgg

SEQ ID NO: 165 - DNA, 2501 bp, Artificial Sequence
  chemically treated genomic DNA (Homo sapiens)
tcgtttgtaaaatggatttcggggcggtagaggggttttagatcgtgttatcgtttttgttgggtcgggtttaagcgtcgggttcgtatttcggtagttgtggatgcggcggttcgtgttaggcggtagcgttgggtagggttgcggttcgtcgtcgaagttgagttatacgggtagtacgacgcgcggattgcgattgtagaagatgatttgggagggttcgcgcgagtttatcgagcgtagtacgggtcgcggtcgttcggtttttatttttttttcggcgtttagttttttcgggtcggattttttcgggtcggatttttcggcgttcgattttttttcgtcgttttttttagggtcgtatttttcgacgtttgtttttttcgcgtttatttcggtttcgttttagtttttcgtttttcggggtatttttttcgcgatttagattattcgggtcggacgtcgcgggattcgcgggtcggacgcggggcggagttgcgtgcgcgttttcgagtcgattttcgtagttttcgcgcgcgttcggtagaggatggaacgcgttcgcggaaatagtcggtcggaggttgtgcgcgtgcgtagaaggattttttagtatcgtaggtcgttgtaacggaggcgaggttaggttaattcgttattgtatttttattataaaattttttttcgtttttttaaggtttggtgttttttttttttttgagatagggttttattttgtcgttcgggttggagtgtagtggcgcgagtttggtttattgtagttttgatttttttggtttaagcgatcgtttcgttttagtttttcgagtagttggtattgtaggcgcgtattattatgttcgattaattatttttatttgttgtttgaaacggagtttcgttatgttgtttaggttggtttcgaatttttgggtttaagtgatttttttgttttggttttttaaagtgtagggattataggttttagttattgtgtttggtggattaattgaattttttttttttttatgttagacgcgtaatgtgtcgacgtcgtaataaggttcgagggtggcgtattttatacgggaatatttaattattacgtttataaagtataaaaagttaattaattgaatttttataaggtatgggtgattagtaaagagggaaaaataattagatttattatgtgtagagtattttggtggaaattggaaaattagatatttattttagagtaattaaaattataaatataaatatttattaattttgtttattttataaatatttattaaggttttattatgtattatttatggtgataagtgttgaaaatattgtaaaaatcggttatgttttttgtttttattgtattttaataaaagcgttatacggtaattaattatataaataaaatagtaattatggtcgggtgtagtggtttatgtttgtaattttagtattttgggaggttgaagtgggttgattataaggttaggagttttagattagtttgataatatggtgaaatttcgtttttattaaaaatataaaaattagtttggcgtggtggtgcgcgtatgtaattttagttatttaggaggttgaggtaggagaattgtttgaattcgggaggcggaggttgtagtgagttgagattgtgttattgtattgtagtttgggtgatagaatgagattttgttttaaaaaaaaaaaaaaaaaaagtgtaattgtgattagtacgataaaaagagatagggtattatagaaggttaaagatttgggggttaaggaagatggtatataattttgtgattaattgtttaatgatgtgggatggatttaagtggagaagtagtttagaaaaagaagggtttagagagttttatattaggttaaaaataatttttttttagatagtttcgttttattatttaggttggagtgtagtggtttagttttagtttagttgtaatttttatttgtcgagtttaagtgattatcgtgttttagtttttggagtagttgggattataggtgtgtgttattatatttaggtaatttttgtatttttagtagagacggggttttattatgtttgttaggttggttttgaattttttattttaggtaatttgtttgttttggtttttttaagtgttgggattataggtgtgagttatcgtgtttagtttaaaaataaattttaagtagaaagaaaaaaatttattaagtgttagatattgtgttaagtattttacgtgaattaaggttatgttattatttttattttatagttaaggaaatagaagggtatataagaatgtgaaggtttagtattatacgtttgtaatttcgagattttgggagtttaaggtaggtggattatttgagtttaggagttggaattagtttgggtaatatagcgaggttttgtttttataaaaaatgaaagaattagttaggtatagtggcgtgtatttgtagttttagtt

SEQ ID NO: 166 - DNA, 2401 bp, Artificial Sequence
  chemically treated genomic DNA (Homo sapiens)
ttattaaagaaaaaaaagatgatttattagatagttgttaaggtatttatataaaattatacgatagtaggatagatggtaattaagagggaatttaggattcgttattattagttggaaatatttgatttttagtttgtaaatgtgataagttagattaatattagtaggatattgaatatagtttgtagggatgagtttttgcgttatttttggatatgtgtttaagtaattagaataatttaaaatgttattaggtttttgttgttatttttataaatttcgaatagtgagttgggtttttaaggaatttgtttttgttagtttattttatgttgtataataaataggtttaaagtttttggtagcgtatattaagtatggaggattttttatttattacgatagttttttcgttggagggttggggttgtattttatttttttttttggaaggggcggtttttgtttgaggttttatttgttttatagtagagggatgaaacggtaggattttggttttgacgggttttatttggtaatggtatatgttaagtgggttacgttttattgtttagagtaagttatatggttacgtttgatattgacgtgcgggaaatgtagaatttttttgtatttggggaggtagatatttggataatatgtaatttattatagggttagttggatgaagaacggttaagggtttaggttttttatttcgagttaggtcgaattagtcggggtcgtgagattaagttacggttattagtgttcgtttggaattatgttttgtttttgtcgtgtttatattgtagtagggtttttgttttttaatttatttgaaattggtggtgggtgtggtatatagatgagaaataggaattttttacgttgggttttaataggagttgcggtgggaatataaatggtgtagttattttggaagatagtttggtggttttttataaaattaaatgtattttttatatatgattcgttatatattatttagtaattgtattttttggtatttgtttagatgagttaaaaatttgtatttatataaaaatttgtacgtggatgttgatagtagttttatttataattgtttaaatttggaagtttttaggaggtgagtgggtaaataaattgtggtgttttcggttagcggaatattatttagtgttaaaaagaaatgagtttaagttatggaaagatatgaaagaattttaagtattattaagttaaagaagttaatttgaaaaggttgatgttgtatgagtttatatttatgatattatagaaaaggtaaaattataaagatagtaaaaggattagtggttgtaggagttagggaggagggagggatgaataggtggggtatagaggatttttagggtagtgaaattattttgtatgatattgtaatggtggatataggatagtaagtatttgttttttatttcgtagaatgtacggtattgagaacggatttttttgtaatatatggatttttagttataatattgaatttttttcggggtttcgtatcgttcgtagcgttttttaattttcgttttcgtttcgtttatcgttttttttttttgttatagcgcgttcgtttcgcggtcgttaattagtcgcgcgtttcggtcgcgcgtttcgtttcgttttcggtgggtgtgcgcgcggttaatgggcggtgcgcgggggtcgggtcgcggcggggcggggtagcggggcggtcgttaatcgtcgtggtgttgttgaaattgaaaatattatattatgttaatcgcggtcgggttcgcgcgtacgggggtggggttcgcgcgtataaagggggcgtaggcgggttgggcgttttataggttaagtgcgttgtgttcgaggggtgtcggttaggtttgagcgagcgagttagttagtaggtatcgagggggcgcggttgtcgttcggacgagataggcgaattcgacgtagaagagtttattatcggatagttaggtagtcgtcgcgtttttcgtatacgtagagtcgggcggcgcggggttttttttgcgttcggttttcgttttttttttttttttttttttttttttttcgttgtttttttttttttcgttgttcgcgtttgcgtagtttcgggttatgttcgacgcgttttttcgtagtatatttacgatggagcgttttgtcgttcgtgggatttttttagtattagtgcgtattagcgtttgtcgtagttttttcgggtcggtggattacgaggagttgagtcgcgagttgtaggttcgtttggtcgagttgaacgtcgaggattagaatcgttgggattacgatttttagtaggatatgtcgttgcggggttttggacgtttgtagtggatcgaagtgg

SEQ ID NO: 167 - DNA, 2401 bp, Artificial Sequence
  chemically treated genomic DNA (Homo sapiens)
ttatttcggtttattgtaggcgtttagggtttcgtagcggtatgttttgttggaagtcgtaattttagcggttttggttttcggcgtttagttcggttaggcgggtttgtagttcgcggtttagtttttcgtggtttatcggttcgaagaggttgcggtaggcgttggtgcgtattagtattgggaaggttttacgggcgataagacgttttatcgtggatgtgttgcggagggacgcgtcggatatggttcggggttgcgtaaacgcgggtagcgagagaggagaggatagcgagaagaaggggaaaggagaggaggagagggcggaggtcgggcgtaagggagatttcgcgtcgttcgattttgcgtgtgcgagggacgcggcggttatttggttgttcggtggtggatttttttgcgtcgggttcgtttgtttcgttcggacggtagtcgcgttttttcgatgtttgttggttagttcgttcgtttaggtttggtcggtatttttcgagtatagcgtatttggtttgtggaacgtttagttcgtttgcgttttttttatacgcgcgggttttattttcgtgcgcgcgggttcggtcgcgattagtataatgtagtatttttagttttaataatattacggcgattggcggtcgtttcgttgtttcgtttcgtcgcggttcggttttcgcgtatcgtttattggtcgcgcgtatatttatcgggggcggggcggggcgcgcggtcggggcgcgcggttgattggcggtcgcggggcgagcgcgttgtagtaggggaagggggcggtgagcggggcgggggcgggagttaaagggcgttgcgggcggtacggaatttcgaaagggatttaatattataattgaaagtttatatgttataggagggttcgtttttagtgtcgtatattttacgggataaaggataaatgtttattgttttgtgtttattattatagtattatataaggtagttttattgttttaaaaattttttgtgttttatttatttattttttttttttttttagtttttgtaattattgatttttttattgtttttgtagttttgttttttttataatgttatagatgtgaatttatatagtattagtttttttagattggtttttttgatttaataatatttaaggtttttttatgtttttttatgatttgagtttatttttttttagtattgaataatatttcgttgatcggaggtattatagtttgtttatttatttattttttgaaggtttttaggtttgggtaattatgaataaagttgttattaatatttacgtgtaagtttttgtgtggatgtaagtttttgatttatttgggtaaatattaaggggtataattgttggatggtgtgtggcggattatatgtgaagggtatatttagttttgtaaggagttattaaattattttttaaagtggttgtattatttgtgtttttatcgtagtttttgttaaagtttagcgtggagagtttttgttttttatttgtgtattatatttattattaattttagatgaattaaaaaatagaaattttattataatgtggatacggtaaggataaggtataattttaaacgaatattgatgatcgtggtttgattttacggtttcggttggttcggtttggttcggggtgaagagtttgggtttttggtcgttttttatttagttggttttgtaatgaattgtatgttgtttaaatatttgtttttttaaatgtaggaagattttgtatttttcgtacgttaatattagacgtggttatgtaatttgttttgggtagtgaaacgtgatttatttggtatgtattattgttaaatggagttcgttaaagttagggttttgtcgttttatttttttgttgtgagataaatgagattttagataggggtcgttttttttaaaagagaaaatggagtataattttagttttttagcgaagggattgtcgtggtgagtgagagattttttatgtttgatgtacgttgttaagagttttgggtttgtttgttatgtagtataaggtaagttgatagagataggttttttgaagatttaatttattgttcgaggtttatgggaatgatagtaagggtttggtggtattttgagttgttttggttatttggatatatgtttagaaatgacgtagagatttatttttgtaagttgtgtttagtgttttgttggtgttggtttagtttgttatatttgtaggttggaggttaggtgtttttagttggtagtgacgggttttgagtttttttttggttattatttattttgttatcgtgtagttttatgtgagtgttttaataattgtttagtaagttattttttttttttttgatga

SEQ ID NO: 168 - DNA, 1508 bp, Artificial Sequence
  chemically treated genomic DNA (Homo sapiens)
attttataattataaatatttagtgtattttgtaaatatggtataatttgttggtataaaattttattgttttagaaaatatcggtaataaaattatagaaaagttaaagatttttattttttatttcgaagcgtttgggagatattttagaaacggatgggaaatgttaaattttgtatgtttgtttatttttttttttatatcgattagatgtaaacgagtgttattaaaagtatattataggtatttatatagattttttttataagggatttataaagtttagatgtgaaatgtattttaaagggtttttagtcgttttttatttttttttttgtgaaatagggaagatatatgtgtttttaagggtagagatggaatttgggttaatgggtcggggggtggggggaagttggaagggattgttttaggatatggtaggatagtggattgtttttgtcgttttgttgtttatatcggggttttttgtaggcgcgtcggttttttttttttttgttgagaagaagttttgttaaaatattcgtttttttcgggaattttttcgtgggtttaaagcgggaaaatgttgttttaggtttaaaataatttgtttaagttttttagcgcgggagaaacgtttttattcgttttttgttttcgggggtgtttttcgttttttgttgttagaattttggggagtgtttagattcggggtagtatacgttcgggttaatcgcgagtagaataaatttttggtgggcggttaggaagtttttttttagttatcgtttttttttagtgtttttttttttttttatataatataagattttttttttttagtttttttaaagtatagtttaaggaaatttttttatagtttttatttagttacgggttagtatgtttgggggtaaatacgtagattcggaggtaggtattcgtgggggggcgtcggttcgggcgtgcggggaagtgttcgtttttgttatttgtttttttaaatatttcgattgttgatttggttttttagttttttttttatttcggagtatttttttggcgttggtatcgttgaagaatgggtttgggcggggaggtgaagagaagttaggaatgttttatgtttttttaatggagagggggtttcgggagtttttgagttaggaggatacggaaaaggggattggggttttgagattgggtttgttgggtttaagacgcgttttttggatgggtttaggatgtttttttgtcgcgggaatttcgcggttcggttttgtttgttgggggttcgaaaaagtggattgtagggtggaaggtgttatttattcgagttttggggatagttttcgggatttttcgttaagcgtttaaaacggtaggtttttaagcggcgcgcggtgtttttgtattttttaaaatttttgaaatattttaaaaatttttttgtattttggcgtttggtagggttttttaaaaaaagtaaattttttttttaaatgta

SEQ ID NO: 169 - DNA, 1508 bp, Artificial Sequence
  chemically treated genomic DNA (Homo sapiens)
tgtatttgggagggaggtttattttttttggaaaattttgttagacgttaagatgtagaaggatttttgagatgttttaagaattttggaaagtgtaaaaatatcgcgcgtcgtttggggatttgtcgttttgggcgtttggcggagagtttcggggattgtttttaggattcgggtaaataatattttttattttgtaatttattttttcgaatttttagtaggtagggtcggatcgcggggttttcgcgataggggagtattttagatttatttagaaaacgcgttttgggtttaatagatttaattttaggattttaattttttttttcgtgtttttttagtttaggggttttcgaggttttttttttattaggaaaatataaaatatttttggtttttttttattttttcgtttaggtttattttttagcggtgttaacgttagaggagtgtttcgaagtggaaagagggttggggggttagattagtagtcgggatatttggagaggtagatagtagaagcggatattttttcgtacgttcgagtcggcgtttttttacggatgtttattttcgagtttacgtatttgtttttagatatgttggttcgtggttggatgaaaattgtgaggaggtttttttgggttgtgttttaagggaattgaggaaggaagattttgtattgtatggggggaaaaaaaggtattggaggggggcggtggttgggagggagttttttggtcgtttattaaaggtttgttttgttcgcggttggttcggacgtgtgttgtttcgggtttaggtattttttaaggttttggtagtagagggcggggagtattttcgggggtagagagcgagtaagaacgtttttttcgcgttggggggtttggatagattattttaaatttgaggtaatattttttcgttttgaatttacgggggggttttcgggggaggcggatgttttggtagggtttttttttagtagggggggagggagtcgacgcgtttgtagagagtttcggtatgggtaataaggcggtagaaataatttattattttgttatgttttaaggtagttttttttaatttttttttatttttcggtttattggtttaagttttatttttgtttttgaaaatatatgtgttttttttgttttatagagggagggatgagagacggttaggaattttttagggtatattttatatttaaattttgtggattttttatggaaggaatttgtgtgggtgtttgtggtgtatttttggtgatattcgtttatatttagtcggtgtggaaagaaaaataagtaggtatgtagaatttaatattttttattcgtttttgaaatgttttttaaacgtttcgaaataagaaatgaagatttttaatttttttataattttattatcgatattttttggaataatggaattttatgttaataggttatgttatatttgtaaaatatattaaatgtttataattgtagaat

SEQ ID NO: 170 - DNA, 1984 bp, Artificial Sequence
  chemically treated genomic DNA (Homo sapiens)
  unsure (9, 17..18, 33, 41, 49..50, 52, 54, 62, 80, 84, 127, 157, 159): unknown base
  unsure (175, 207..208, 214, 1181): unknown base
agttttagntattattnntatttttattaatgnttttgggnttataggnngngnttttttgnttaaatagtagttaatgnaggnattttaaaaggtatattattttatatttatttagtggttatgntattatttaatttttattataattttgtgngnttagtataatttgtgnttttattttatttgtgaataaatggaggtagnnntttgngtaatttataagtaagtggtagattcgggggttgtgtttagataatgtggttttagattttttgtttttttttgttttttgttgtattttgattgagtttagttatttatttttttaatatatattaattgttgtttttatgttttaggttttgtgttagatgttagaaatatatttttatttattggattttggtatggtttattgtttagtgttttgttatgttacgtgttatataatgtatttatttcggtatttagtttatggaaaataatgttgaaagatattgtatgtatgtttttataataaaattatgtaatttatgttttttttattgttttggttattaggaagtttttatttaaattagagtaaatatattagaatttgggtttgttattttagtttgttgaatttttttttttggtttagattttttattttggtttataaattttattgtataaatgttttttattgtaaaatattttaaattttttttaagggaaggttgtatggaaatgatatagtaaggttttttttgtatttttttagatttttattagggaaggtagatttagatgttttttttatttttagttttaaagttttttatttataaaattttttaagtagtgattattgttgttttgagtatttggaggtagtttagagtttttgaaaggtaaaatttatatataaaaagaagtttttttcgatttagattttagttttggtgttagatgtatatttgaggagtaggtggttagttagatttttatttgagtagttaataaaatttattgttttttaatggaattttttttgtaagttcgaattgatttgttatttttgtgatttgtgagatggtagggaagtattaaatattattatgatttgggttatagtggtgggaaaaaaggaaaaaagaaaaaaaaaatttattgttaagttttgttaggcgtanaaagggttggaattgttggggttattttatttgatttattggaaatagagtggattttattaatattttaataaagagaatttttttgtattaggttggaagtggtcgttagtttttcgtgtaattttattttttggaaaagtggaattagttggtattgtttagcgtgatttgtgaggttgagttttaatagtttaaagaagtaaatgggatgttattttcgcggggttcgtttttcgcgaggtgtttatttcgtatttgttatgtaaaacgagggagcgttaggaaggaattcgttttgtaaagttattggttttggttattagtttttatttaatgttttcgtgatgttgttgttgatttatttgggaagttggttggttggcgaggtagagtttttttttaaagtttggtttttacggaaaatatgtttagtgtagtcgcgtgtatgaatgaaaacgtcgtcgggcgtttttagtcggataaaatgtagtcgagaatttcgttcgttttgtgcgtttttttgttttaggtagggaagaggggttgtcgggcgcgttttgcgtttcgtttttgtattcggatcgttcggtacgggtagggtgagggggttttcggggggtcggggttttcggtcgcggcggcgaagatagatcggggttcggtagggaggttatttcgagtttagagattttaggtattttttatatataggtttttattttggcgtgcgtgcgtgtgtgtgtgtgtgtgtgtgtgtgtgtgtgtgtgtgtgtgtgtgtgtacgttcgttaacgggagga

SEQ ID NO: 171 - DNA, 1984 bp, Artificial Sequence
  chemically treated genomic DNA (Homo sapiens)
  unsure (804, 1771, 1776..1777, 1810, 1826, 1828, 1858, 1901, 1905): unknown base
  unsure (1923, 1931, 1933, 1935..1936, 1944, 1952, 1967..1968, 1976): unknown base
ttttttcgttaacgaacgtatatatatatatatatatatatatatatatatatatatatatatatacgtacgtacgttagagtgggagtttgtgtgtggggggtgtttaggatttttgggttcggaatgatttttttatcgagtttcgatttgttttcgtcgtcgcgatcggaggtttcgatttttcgaaagtttttttattttgttcgtgtcgggcgattcgaatgtagaaacggggcgtagagcgcgttcggtagttttttttttttatttgggataggagaacgtatagaacgagcggagttttcggttgtattttgttcgattagaagcgttcggcggcgtttttatttatgtacgcggttgtattgagtatatttttcgtgggagttaggttttgaggagaggttttgtttcgttagttagttaattttttaaatagattagtagtagtattacgaaagtattgggtagaggttgatgattaggattaatggttttataagacggatttttttttaacgttttttcgttttgtatggtagatacggggtgagtatttcgcgaggagcgagtttcgcggaggtggtattttatttgtttttttggattgttggggtttagttttataaattacgttgggtaatgttagttgattttatttttttagagaatggaattgtacgggggattggcggttatttttagtttagtgtaaaaagattttttttattaaaatgttaataagatttattttatttttaataaattagataaaatggttttagtagttttagttttttntacgtttggtaaggtttggtagtggattttttttttttttttttttttttttttattattgtggtttaagttatgatggtgtttggtgtttttttgttattttataaattataaagatgatagattaattcgagtttgtagaaaaaattttattaaggggtaatagattttattaattgtttaggtgagagtttgattagttatttattttttaaatgtgtatttggtattaaagttgggatttggatcggaaggaatttttttttgtatatggattttattttttagaagttttgaattatttttaggtatttagaatagtagtagttattgtttaagggattttataaatggggggttttgggattgagggtaagagggatatttaggtttgttttttttaataggaatttaagaaaatgtagggaagattttattgtattatttttatgtagtttttttttagaaagaatttaaggtgttttataataaaggatatttgtgtaatagaatttatgaattaaaatagaaaatttgggttagaaggaaaagtttagtaaattgaaatgataagtttaaattttaatgtatttgttttgatttggataagagttttttgatagttaaagtaataaaagaaatataagttatatagttttgttgtagaaatatgtatataatgttttttagtattattttttatgggttaaatatcggaataaatgtattatgtaatacgtaatatagtaggatattgagtaatggattatgttaagatttagtggatggggatgtatttttagtatttggtatagggtttggaatatggagatagtaattagtgtgtgttaaagaaatagatggttagatttaattaagatgtagtagaaggtagggaggggtaaggagtttggagttatattgtttaggtatagttttcggatttgttatttatttgtaaattatntaaannnttgtttttatttgtttatagataaaatgaaantataaattgtattgantntataaggttgtggtgaggattaagtgatgntataattattgaataaatataaagtgatgtgttttttaagatntttntattggttgttgtttggntagaaggntntnntttgtggntttaaggntattgataaagatgnnagtgatgnttgaagtt

SEQ ID NO: 172 - DNA, 17897 bp, Artificial Sequence
  chemically treated genomic DNA (Homo sapiens)
atattgtataattttttatttatgtttaaagtaaaggatttattatatattttgaatatagtttattttttatttttatttggaattgttttttttttatggttttttttttttttaatttttattgtttataatatgatattataggttaggtatgtttgtagataattgggataatttatttttatttaagtaaaaattttagatggtagtttttttatttgggattatgaagtaggtaggattttttttttttttttaatagagtttaagtagtaagatcgaataagatgggatgaatttaaagagaaatatttgtatttgtttagttttttaattaatatttattgaatttttttacggttaggtgtgtaagatgttaggagggatgagataagatgatgatgatgatgatgatgatgatgatgatggtgatgatgatagtgaggatgagggtgaatattttaatgagagttttttatatgttagggattgttttaggtattttatatatattaatatatatatttattataatgattttgtattgttatgtgtattttatatatgaggaggtagaggaaggaaatgaaataatttgtttaagagtatagagtttgtaagtggtaaagataagatagaaataattttttaagagtagagagtggtgatttttggggatagggaagtggaaaagtggggagataaaggttgttgttttttttaataagttttgaagatttatttgattaggtttaagaaaaatttgataattattataaagtaaaaggaagaggagatgaggtgggtttttgggtatagatgtttgttttggaaagtttagggaggaaggggtgagaggaattgggttgtagtataggaatgggggatttgggaattagaggggattggttagggtgggttattgattgtagtgaatgtttatttgttgattgggttgtagtataggagtggggggtttggaattaagaggggattggtttagggtgggttattgattgtagtgaatatttatttgttgattagtttgatttagaagaaagggagagatggatgttggaggagagagggggtttcgagggagtttaggattggaggtgggaagatatttttacggatatttttttattttgatagatagaaaagatgatggtttgtagtagtagatttataaattgtgattgaaaggtttgatggttttttttattcgttttttttatgtatagagaggtggagtaatttgttttaggtattatagtttataagtggtgaagttggagttgggggttatagattatcgggtttttttttatgaatttttgttgtattttggttttttttaatttcgagtatttatgagttttaagaaagatagttgggaataggtgatttttatggttatttttggaatatttggttagaatattttagtataaaatttaagttgttgttaagtagaaatttttagtggatattagtttagaaaatttaattttattttgtgacggatttgtagcgcgtgtgtatttattaagtaaatttgattttattgttgattagcgagaaagaggaataatgtaaatagttagtgtaattgtatttatatttagtttcgtgagtttttgttattttagttggttgcggtgggggatgtggaggtgtatgtagtttttaggttttagtgaggggtttttgtatagggtgggcgttttttatgttttatgtgtatttaggtttgtattaaagatagttttttttttgtagcgtgatatttagttaagaaaattattttatttggtgtttagcggaagaaaatattttttttaatagggaaggaaaattggttgtgttgggttgagggaggggagtgtggaatttaaatggtgttttttttaggttttttttaaggtgatgtggattttgattttagaatgttattatttggaaaattgtgttttattgtttaaatttttgttttttttttttgtttttttttttttattttatttttttttttttgttttttgatttatttaatgttaatggttttttagaaggttaggttttttatataagtttagttttttgttaggtaattttttcggggttttaagttgtaaatttgggttgtttttcgtattttgttttgaggatttttttaaagagataggtaagggttttttttggtaaaatgtttttttaattttatgtattagttttatttgttattgaagaagtgggtcgttttttttgcgtttttgaatttgatattttttattttgatatttcgtatttttgaatttgatatttttgtatttttagtaggtaaaaaattaaaggtgtttatttaataaatcgtcgtaatggggagtttatgggaaaatgggtatgtgtaagttggttaaaggataataggtatataggttgtttgatttgggagggtttttagatagtaggatggtttttagagatgtatttttgttgttgttgttgtttatgattatgtttttagggtttagaatggtgtttgggtatagtaggtttttaatatagttagggaatgaatgagtttattttaattacgttgtatggatggagaaattgcgttttggggttgtattatgttatgtatttgtagaaaatgtttttgtttttttagtttttttttagtggcggagtataggatttagtttataagagtagtttaattttgttatttgtggaatgatagaataaataagttttagggtttagggaggtaaggtttttgttttagttttttaagtagttggaattatagttgtatgttattaagtttatttgattttttatttttttgtagagatgatgttttattatgttgtttagatttttttggaatttttgggtttaagtaatttttttatttttgtttttgaagtagttgggattataggtatttgttattaggtttggttagtttttattttttttgtagagatgggatattattatgttgtgaaggttggttttaaatttttggatttaagagaggtttttgtattggttttttaaagtgttgggattataggtgtaagttattttatttggatataatattttatttgaaataagaaaaatttttttttattgggaatgttgtagttgaattagtttaaatttataaagaatggaagattgtttagtggttatttatttatttattaattttagatgttaaattttttagggtgggggaatgtgtttttatatttaaggtatttttgaatgtagttaaattttgtagtttagttaaattttatagttaatagttaaattttgtagtttagttaaatttttttagtagtaaaatttatgatattggaattttgttttttatattggttatttgtaatagaataatagagttttagtattagataggttttgaaagattattgaatttaattttttttttttgttagtgagaattttgaagtttagatttgttgatttgtgatcgatagtgttaaagataggtttgaaatatagatgttttgggttttagaggtgttgtttgtttttttttatattttttttgttttagaaaatttttttttaaaattggttttaataattagaggggaaagttatggtttttgttttggggatagtatgggttggtatagaaaagaggtttataatttagtaggaagtgttgtgcgtgcgcgcgtgtgtgtttgtggaggcgtagggagggttatttgagtttgttttgggtttggttttgggtttagtggtaaatttaacgttgggtaggtggtttgaggataatgacggtgttagttgtgagttagattttttttatttataaaattatgtttttttatgtagtgttttttaatttggttgtacgttaggagttatttgggtagttttgtaaaaattttaatgtttagttggtttgtattttttgagattttgattaaattgttttggagtttatttttttttttttattatttatttatttatttattttttaatttggcggtttttttgggattttttatatgtagtaggggttgagaattgttggtttttttggttagatgggaatatgtaggttaatagttacgtataaatagagtagtagagtaggacggtgttaaggttggaaagggtgagttatgaaagtttaggaaattagaataggaaggggtgagaatttttttatttgggtttgtggggtaggagagaagagtttagtgggtaaggtttagtgagtgtgtttagaattgggaagatgaggggaagggtaagcgttgggcggcggtgggtaagatggacgagattaaacgggagcgaggattttagcgagagttttggcgatacggaaggttgagaatcggagggagtttgtcgggcgaaagcgaaggcggttgttgggtaggtagtcgaattcggttggagagtcgagttggtgagatttataggaagtgaagggagtcgtttagggcgtggcgtaacgagatttttagaagaaattttgaggtagagatggggggttttcgtttatacggagatataaggaagtttatatgtatacgtacgagcgcgtatatgaatacgtataagtatataaacgtttttttcgggtagggtatacgcgttcgttgtataggtcgaggttttggattcggaggggattgtagagtcgatttataattcgggtttcgatgtttttttcggtcgcgtttttacgattgtttgcgtaataggcggcggttttagtgggcgttcgtcgcgcgttgtcggagtttagtttagttcggcgcgttcgggaggagggagtagggagcggggaaggggtgtgtttcggttgcgtgttgggattgcgagggtttgggaggggcgaggcgcgggggcggggtcgcggcgtttataaagtcgtttttcgttcggacgtaaataaatttcgtttggtttttagttggtgttgaagttcgttagtttattattcgttttcggttttcgcggggcgttgggtcgttagtttcggtatcgtttttttttttttttttcgcgttaggtaagttcgcgttttttttttttaggcgcgacgcggagtagaaaggggtcgttcgtgcggtgtcgttggagcgttaggatcgttttttgtagtttcgcgtattttaggagtaagcgtttcggagttgtaagtgcgcggttatttcggggcgcgggcgcgagggggttttgggtgtagatatcgttgaagtggggggtttaattacggaaagggaggaaaaaaagatagggttttatttattttttttttagttggggattggggttttggaggtcgggaagggggcgatgagacggttcgaaaaaatattaggatagcgttttttggcgtcgttttcgaattttagttggcgtcgttggtaggggtgcgcgttggacgtgggtgtagaagggattaggtgagtgtgtgtgtgtgtgtgtgtgtgtgtgtgtgtgtgtgtttgtgtttgggaacggagagattgcgcgcgagtgtgtagatgaggggttggtagaggtgagtggcgttggtaaggaggttggagaggggggcgtgggtgtgtttggtttgtagattgggtcgggaacgggtgtggattcgagaggttggtggcgttttagtttcgtagtatatatagggcggtgtgtatgtgtgagtgtaagcgtgtgtgtggggggagggtttagggtgtgttatagtgtaatacgcgagtcggagtaagtgtttgcgagcgttattgggtagggtgcgttttcggaggaattcgggattggcgtatcggcggcgtgggagaagtgatttgggcgagaggggtttcgcggatatttggcggttttttgagttggttggagttaggagtggcgttattttcgttttcgtttattttttttcgtttttttttttttttttgtttttggtgttggtcgtttttgttttttacgggggaaaatagttggaattatttcgacgtttttgggggattcgtcgcggtttttgatttagtttcgggaggagatttcgggttgggtttggggaatgcggttggttttgggggaaatacgttgttacgtttttgttaaattagtagttggagttgggatttagtgggtcggttttttatttattttttttttatatttttcgtttgttgtttttgttgtttttgggggttttgaatagtacgtttttgtggtttggaagtgggagatgtttggtagtgggtgggggaggtagggtttttggttattttatgtttatttaagaatattttttttttacggacgttgggggtattttagtttgtttggtttttttaagttattgggaaatatttaatatttagaagttagttagtggttaggtaggagggcggtagatatttttataatatttattagttgtacgggatttttttttaagttgttttaaaagaatatatttaaatataaattttttgtttttgttgtagaaatgtagttttaaggcgaattttttagtttagattttttttgttgagaaattttggcgtttttattgagttttataaatgtgattgaaataagtaaggtatagagggggtaaattttagcgttttttttggaagggttgttttttggtggggaagatatacggttggagacgtagatcggttttgtgtggtgtgtgtggcggtagagttagttttaggttggggtggtatagtgtcggggatgaaggaaggtgtaagggagagagagggttttggtgtggatggaaaattgggtgtttttttgatttgtgattttttagttttgtgggatcgtgttttttattgtatttgggtaaggaggaggatttgtttgttttgttttgtaatttggtttttggtttagcgtttggtaggtgggaggagttgaaatatgtatatgggatgaagtggatggttttgggttttttgttttatttttttgtgaattagtaggttgagtttcgggcgaggtaatagattgtgtatgggtggaggtgttggtttttgtttttgagggattttggagtgtttgtttgggttttttgtgaggaagtttttttggagtaataaagtttgattatttggaatggaataaaaaatttatataggatttatttagtttaatttttttttattttatagatggaaaatgaggtatagggatggggagggatgtgtttaggtcgaattgagttggagtttagttttgtgagaggtttttgggtgggattgaaggtagtggaaagggtttttggtaggattttgtttgtttgttatggaggggcgaaaggaaattgtatttttattgaatttttggtgaggaaatttttgaggttaaaggggtagagcggaatgattttttttaagtgtaaattaggtgtttttgagagattagtaaagttagtttgaagggtaggggtttagaggttgtagttttttgagttggtttttgattgaatggggttgttttttttttatgatagaagatagattttaattgagttgagggtttttttgggttacgttgaaattcgttggtttgaatttgtttttttatggatttgaaagaaagatagtattgtgtttttcgggtggtttaaagttgtagtttttttttgggatttaattttagagaattttattttagatgtgatttagaggttttgttttgggagagaaagcgtgatgatttagtatttgagatttaagtagggtttaggtttgatttagtttggaaggaaggttagggagggatacgatatttttttttttttagagtagttattgtttttttttatttgtttttattttcgtaagaacgttgtttggatcgtattgttttattgaatggatgaggtaattgaggttaggagagttttaggatttgtttgttgttatatggtttaggtgggagagttagattttgaattcggatagttggattttagagtttttgttttttttttatgataatatgttggggcgtttgaagaaattaggtttaaatgaaaaggtagttaggagttttatgttttagtttgtttttttgtaaaatgagagtaatagatatgatgttattagaatgtgtaaatattaatttgtgtaatttgagaatagtattgagtatgtggaaaatagcgtgtaggtgtttgtcgttagtagtattcgtagaagatatttttaaggtatttttttggtaggtagagtttgggattttttgttttaaatttatttaaggttgtgaaagtgtttgtaaatgtttgatttaggtattgttttttgttaagtttatgtaggttgtataatagtgttatgaaaattttgtttgaaatgtatatttttaggttcggttttttgcgattttttttttattaggggatatgttgttgttttaaagtttttttggttgggttgggaatggggtattttgtaggtagatagagttgagaatttttgttttggaatgataggggagagaagaaggaaggtgtagttatatatgtcgttgtatttttaggttattttgtgtttatagtgttagggaattagtgagtgtttagtaaatagtttttgtttgttatagtgttttggaggtttaatgtattatattagttaattgaggtagaagatattttttttattttttaggttagaaaattgaggtttaggttggtgatttttttgtttagagtttagtgagtggggttttgtttaaggtgagttttttgagttttttttattttttaatattgcgtttggaggttatttatattttttgggtttattttttgagaaggagtttgttttttggatttattttaggttgttgtttttgttttttttgatggttgtgtgatggaagtatcgcgtgtttatttgttttttattttttaatttggagatagaggtaggttagatagcggttttggttgagaatttagtttaggtaggtaggtagaagggttggggatattgaggttttataggaaggcggttgtagaggtagagggttatgagtaggtgttaatttggagtcgtgttttcggggtgggggttatgtgaaaagaaatttgggttttttcgggtggggcgtaagttttagtattatagaatgggaatggattatataatcggggttataagtaggtttttttgatttagatttttgatttttttatttaatattgtttgtagatttgtttatgttttatttgtttgggttttatttttgattttttgagtttagcgggtttttttgtaattgagttggtagaaagtgaggttttttaatagtttgggggttttgagtgttttttttagtagtttaattttttttttttttaaatttgtggggagattttttgtagttatatattttaaatttgtatagagttttgtttgaagagaggtgggtgggggtttaggtttttattttgtttttttgtttttattttttgttttatttttacggaatttaagaagattttaagtaattttttttaaatatggatgtgagagggttatttaagaggtgggtttatggttttttttagttgggaatgtttattatttttttttttttttttttaattatggaattttttttttttttttagaaaggtttttttggttgttttttgttggaggggaggttgggttgggttttttttgggatttgtttatgttttttatgaaatttgagagtttgtttttagtaggtgttgtgttagtggtggtggaaaggatatttttattgattaaggaagtaatttggattattttgtatagataagatcggaggtttatttcggagggtggaaattgtaagattattttggggaaggattttgttagcgtggttagtattttatttcgggataaagggttttgtatgaggaagttattttttcgttttttgttaatattggtttcgtttgtgtgatttttataaattattttagattatttagcgtagtttatgtttgttttgtaattttataaaataattttttaaggagattagtgtttttttttggatttttagttatttatttcgtttttttagacggtcgttttttgtttgttaaataaattattcgtgttgttaaaattttattgagaatttttaggaagatttcggttgtattgtagaaaagaggtgggttttgacgagatttttgatatttttttttttttgttgttgtgtttgggatatttttgttgatttttttggtgttgtgtttaagttgaatatatagtagtttagttttagttttagtttttttggatttatatttagggagtgaatgcggttttggtttgtttgagagggagatagtggggtttatttttttagtgattttttttttattttttgaatattaaatattattgatgttttttgggttttaggttttattgtaaagtataggggttttcgaggagtttttattgtggttttgttttttgatatttgtattgtttttttgattttgattgttttgatatagttttttaatttttaaattagggaatttttttgaaggtttagtgaatttatttatattgtttgttgagttgattagttaagaaagatagttcgtgaagattgttaatttttttattttttttagggttttgagttttagaagggttagaaaatattaagagagtttatgaattgttttgtagtttgattttaaaatttttttgggtaaagaaatgataaaggattgtatttatagtaaggtagggttatttagggtttattttaaggtggttttttttgaggtttaggtagaaatggtgttgttttcggtaattttttggggaagttgttatagtaaatagttatagtatatgttgattttttttttttttttaaaaatttgttttataaagagtataatgtgttggagagaatattggtttttatgtggttttaaaattaggtatgttatagagggtggaatttgggttagttgttgttggtgataatcgatgttatttttgttagtaattttcgtttgttttttttttatttgttttattgaaggtttttaggggattgttgttcgttttttttcgagggaatgagtgttatatttgtatttataataaattagtgagttttttattttttttttagtagggaggaatttagatatgtggtttttggaagttaagtgggtttttgtgtttgtttttgagttttaggttatttatttgtgaattgggtataatatttagtttttttcggggtaatttttttgaggagtaagtgaaatagtgtgttgagtgaatgtttttttaaagtattgagttggtcgttttaggaaggtattatgggggagttgaaaatagagaattttttgggtgttgtgaagggagaaaagtttaagatgttggttttgttaaaagtttaagtttgtttatgatggtttagtggtgattgtagggtggaggagaggtatgtgattgttttagttgatttttatacgttgaaagttttatggttacgtgtagtttattttataacgttgtatttgggttacgggtggtggtgaggattgtggatatatttagggtaatgtgagattattgttaatattttttttaaggttgttttaattttaaagtagttagtttgatgtttgttgatttggggtatatattttaattttttgatgttttagttttttcgtttgttaaatggtgatatgttggtattttttttttagggtttttgtgaggtttaaaggaagtatcgggtttagagtttagttagtgttatagatattgtttttggtgttgtttttgtggtgtgtttgtgtagggttatattgttgtttttttgtggttgttttttttggtgggcggaatttggaatttttagaatagattatggatgtttttttgttggatatttttttagttttattttgtgggagttgtggcggggtttaggagagtttgtttaagagggtgtgtaggtgggtggtagagttggagtaaggtattagttttaatagataggagtttgaggttggtagaagtgggggttttggtttaaggtgcggggttaatttggttagagttgagtttggtagggttttggtaagattttgtggtttttttgttttggtgaagtatttttttgtttgggtttttatttgtttgtaagtttgttgtggatagcgtgatttttatagacgtatattgtgtttattttatagatggagaaattaaggtttagagaggaagtgatttgtttagagttatggaataggaaagtggtagggtttttatgttttgatttttaggttagcgtttttgttgttttattgaggtttttgggaattataggttttgtgtgttttttttagttttttaggggttgttgaatagtttttaagtggtgtcggattattgaagatgtttttgtttattgtttttttaggttttagggttacgggttacgtttttttttttttcgggtagattttggttttggttttgtttggtatttgtgatttagtttttttttgatttttttgggtttgttggattggaagggtatttgtgtagttttttttgggtttttattatttattgatagatagtgttggtggagagaagggttttagtggtgacgtattgggtttgataattagaaattttggtggtatttgttgagtattttttatgtgttttttttttcgttgggattttaggattgaaatttaggttatatttttatagatgttttggtatttttaaggtaattttgaaaggaaagtatgttgatgaattaagtaattgtttgtttaattttttatgttatttttgaatttaagttttattgttgattattgggagtaggagttagtatgtttattgatagataagtaaattgaggtaaagaggttagatagttaggtatggtggtatatgtttgtaattttagttatttaggaggtcggagtaggaggattatttgaatttaggagtttgagattagtttgggtaatatagtaagattttgtttttttaaaaaataagatgaataatatatttttaaaaagagattcgataaattatgtaggattatagagttaataaatggtgatattatggtttgtaagtttttttttagtttttggttatttttcgtttttttggtattggttttttcggaattttttttaggtaggtggatgggaaaagaagtgaagatataggttggtagttggtgttgtgatttggagttttgtttttggtgttaagttgggttttagttgaaggagatttgttggaggggttttttttgtgttttttggggagtaaagatggttttggagatggagatacggtttgttagttttaagttattttaaaggtggggttggtgggttaggagttagttttggttttttcgttatgttgtgtgtggttttgttttgttattttatttgttggaggatttttttgatgttttttagtgggttttaatattttgtgattaggattttgtatgaggtagagggagggtaggagttggagtttagtaaggattttaagtttagggataggttttatttgttatatttgttaagtcgtgagggttttaggtgttcgggaggagggagtaggagtggaagtattagttcgagtcgttaaattaggttacgtattatttgttattttttgttggtagaaggagattatagatattagaagatagtagtttttgttagaattgggtttttttatgatttttaggtggtgattttgaattttagaaaaagtgttttggggagagtggagtgaaggaagagtgtgaatattggatttgattttattttagtttttgtgttgtagttagtagggtgagtttaggatagttggtagtcgtttgggtttagttttttttttcgtgaatgaaggtggtggggagtgtacgtgtgcgtgtgagtgcgtgtgagtataaatgattgtggatgtgagagtttatgaaagtgagaatgtattagtgtgtaagaaagtgtgagtatgtgagaatgagtgtgtttgtgagaatgtatgtatgtgtgagtataagtgtgtgaatgtgagaatgtttgagtgtgagaatgaaagtttgtaagtgtgttagtgtgagggaatgtgtgagtgtatttgagagtgtgtgtgtgtgtgtgtgcgtgtgtgtacgtatgtattagattaaataagaatgtatttaattgatattttttggatattgttatttattaggaattattaaaattagttattttagaggagggtggatgtcgtattaggggatatttggtaacgtttgtagatttttttgttggtcgtagcgtggggtgtatgttgtgggtatgtggtgggtagaggttagggatgttgttgagttttttttcgtgtttagggtagtttttaaggtagaggttgtttgtggggtttaaatgttagtagtgttgagttgaggatttttgtttaggaggtatagacgttgttttggatgttgtttagatagtatttgttttgttttttagggggatagatagatagtggatatagtttagatgtagtttgatgagtgagtttaagggagtgtttgttttttcgggattgtgagtttcgtgggggtaggaattgggtttgtttgtttatgatttttagatgagttttatagttagttttattattatagttggtgttatttttgttttgagttttgtgttgggtatatagaatttagtgggtagaaatttttgaataaattttgagttttttattttgttttcgtgaatttagatgttttttgagggttagtttggtggcgtgggggttgggagtgggtagattgtagggagttaagttttggggtggagtggggtttaggtttttttttttggtttgagtcgaagtattttggttttttaaattttaaaatttttattttttaatatttttatatgttgaatttttttatatgattttttttggataaaagtttttgtaaaaaaagtttgaaaagttttttggttgaggtattagggataaggtaagggttgtttgatgggtttaattcgggagaattgaggtgagggagtcgttttttttttattttataggttggttagatggtggatcgttagtagttggttgggttaatttgtagagagtattttttgtagtttttggtttatgcggttttagtattgtaggacgcgattaatatgtaggttatttcgaggtttgtagtttttatagtttttttagattagtgtaaagttttatttagtttttcggtagattttagagtttaggatattttttaaatggtttaaaattaatggaattatttgggggataataaataatgttattagatattgttaaatgttttttgggagagaaaattttttttagtttagatatatttcgtgattatttttagtagttttatttttggattttttaaaggtttttagtagtgagggggttgggttagagaaggttttattagtttttaaaagtagatgtttaagaatttgatatttttaggatatatagcgatttttttaatttattgttttatgtggtttgggaagttaagttgtaggaataaaaaaggtgtcgggtagggtaaagaggttttattagatagaggaaacggggaaggtggatatttttgttttttttgttttggagaacgagagagttggtggagattgatagatattatgttttaatgtgattacggtttttggaagttaaagagaattgattaaattgggttgaattatagtatttttcgagtttttttaaatgtagaatttgttttttagatattgtatttttggggtttagtaatgatttaaaagtgaattttattgaaagtatgttgttgagttatattgtttatttatttagagagggagttgtagtttgattttttgtttaggagagtttttcgtgttgggagttagaggtagagaaaagaataagttatttgtttgatgaagtttatagataggattgtttgaatttatttggtgggatagtgagagttttttgattttattttggcgcgttttgttgagtagggtatgttaagaagtttttgtgaaatgagaagtttttttatttttagaatgaggggtggcgttggtagggttttgggtttttggaaggttttttaggttatgtaggcgaggtgttttataggttagggttttgggattacgaatttgttgaattagtaaggttaatagacgcgggttttttatgttttttgtttttaagttggtagttgtttaggaatgtttataaatataaaatcgattttgtttttagaatgttttggagtatagattttaaagtttgtataaagttatttttgtggggttggttatttattggggaaaattatgttggggttttagattagagtattttagtggagagtaggatttgtttacggaatgttatgtgttggtataagggatggattcggggtggattcggggtggttcgtatttgtcggttgatttttaagaggtgttttattaggtttttgggagtttttgggtttttagaggagttttaggtaggaattttagaggtttgtattttttcgattattgtattcgaggggttttgggtagtgcggggtttaggtttttattttgaagttggttgtgtgagggttttggttaggcgttttttatttagaaagtttggatttgtgaattgggtgggtggtttgggttttttttttttgttatttatttttttttcgtcggttttttgttgttgtttgtaagatttgattttattttgtattttttatgttttattttagggattgatgggtatttagtttttttaatttgattattgatttagaagaatatatgtttatatttttggtttttagatttagtttttggaggtatgtttaatagatagtattatttgtttaagttttgtattttagggagttagtggtagtattttaagtttttttgggttgtgttttagtttggttttgtagtttatatttttgtatttgttttgtgttagagtataggtaatttttttggtttattttttgttttgatttaggaagtgttttttgttttggaggtttttttttttataaaattgtattgtgcgtttaaatgtttgttaaattttttgatttaaggtttttttttgtttttttttttttttagtaggtagtcgagagttttgtatcgtggggtgtgtatgtgtgtttacgcgtatgcgtgtgtttgtgtgtttgtgcgtttgtattattaattttttgttagggttaattgtgaggttgaagtttgtattatgtttatacgtggtaagtatcgtgtgagtttgtgttttttttttattgttatacgggggttgtttgattttgggattagtaatgtaggtttttttttagaatgtagtgagttgtattttgggtatggtgggtgggtttgaatttggtatggggatttgtttgtgaggttgatttatttattttattgggagggtggtgtttgtgagttttagtatttttttttaggaaatttattgcgttggttttaatgggaagattgggttgggtttatgggttgtgtgtataagggatttttttattttttgtagtgtattacgagggaggtgaagttgttgggtagagcgtaggtttggtttttttgttattggttttggatttgttttttttaggaaattttttagtaggaagtgttgattttttggtttttgtttttttgtagg

SEQ ID NO: 173 - DNA, 17897 bp, Artificial Sequence
  chemically treated genomic DNA (Homo sapiens)
tttgtaaggagataaaggttaaaaggttaatattttttgttgagaggttttttaaaggaagtaaatttaagattaatggtaagaaggttaggtttgcgttttgtttagtagttttatttttttcgtgatgtattgtaggggatgaggaggttttttgtatatatagtttatggatttaatttagtttttttattggggttagcgtagtggattttttgggagaggatattgaggtttatagatattatttttttaatgaaatggatagattagttttataaataggtttttatattaagtttaggtttatttattatatttaggatgtagtttattgtattttagaaggggatttgtattgttgattttaaagttaggtagttttcgtgtgataatgaaaggggaatataagtttatacgatgtttattacgtataggtatagtgtaagttttagttttatagttagttttaatagaaggttggtgatgtagacgtatagatatataggtatacgtatgcgcgtgaatatatatatatattttacggtgtaggattttcggttgtttgttaaaagggaagaggggtagaggaaaattttaagttaaggagtttggtaggtatttgaacgtatagtataattttgtaagaaaaaagatttttaaggtagaaagtattttttggattaaagtaggggatggattagaggggttatttgtgttttaatatagggtaggtgtagaagtgtgggttgtaaaattagattgaagtatagtttaggaagatttggaatgttgttattgattttttggggtgtaaggtttgggtaggtggtgttatttattaagtatgtttttaagagttgaatttagaaattagaagtataagtatgtatttttttagattagtagttaagttagaaaaattaaatgtttattaatttttggggtgaagtataaaaaatgtagaataaggttaagttttatagatagtagtagaggatcggcggagaagaagtaagtgataagagggaagagtttaggttatttatttagtttatagatttagattttttgaatggaaaacgtttgattaaagtttttatatagttagttttagagtgggaatttgggtttcgtattgtttaaggtttttcggatgtaatggtcgagagaatgtaagtttttgaaatttttgtttagggtttttttgaagatttaggaatttttaagaatttggtgaaatattttttagaggttagtcggtaagtgcgggttatttcgaatttatttcgggtttattttttgtgttaatatatggtatttcgtgggtagattttgttttttattggggtgttttggtttggggttttagtatgattttttttagtagataattagttttataagaatggttttatatagattttggagtttatgttttagaatattttgaaaataaagtcggttttatatttgtgagtatttttgggtagttgttagtttggaggtaggaggtatgaaaggttcgcgtttgttagttttgttaatttagtaggttcgtggttttaagattttggtttgtgggatatttcgtttatatggtttagggagttttttagaaatttagggttttgttaacgttattttttattttgggagtgaaaggattttttattttataggagttttttagtatattttgtttagtaaagcgcgttagggtgaagttagggggtttttattgttttattaggtgggtttaagtagttttatttgtgagttttattaagtaggtagtttgtttttttttttatttttagtttttagtacgagagatttttttaggtagaaagttaggttgtaattttttttttgaataaatgagtaatgtagtttaatagtatgtttttagtaaaatttatttttaaattattgttaaattttaagagtgtaatgtttggaaaataaattttatatttaaaaggattcgagaaatgttgtggtttagtttagtttggttagttttttttggtttttagaaatcgtgattatattaggatatagtgtttgttagtttttattagttttttcgttttttagaatagaaaagatagaaatgtttatttttttcgttttttttatttggtgaaatttttttattttattcggtattttttttatttttatagtttagttttttagattatatgaggtaatgggttaaaaaaatcgttgtgtgttttagaaatattaagtttttgagtatttgtttttgggagttggtggggttttttttgatttagtttttttattgttaaaggtttttgggaagtttagagataaaattgttgaggatgattacggggtatatttaaattaggggggatttttttttttaggggatatttggtaatgtttagtgatattatttattgttttttaaatgattttattgattttgaattatttaggaagtgttttagattttgaagtttgtcgggagattggataaagttttgtattagtttggggggattgtgggggttgtaggtttcggggtagtttgtatgttggtcgcgttttgtaatattaaggtcgtatgaattaaggattgtagaaggtgttttttgtaggttgatttagttagttgttggcggtttattatttggttagtttgtagggtgggaggagagcggtttttttattttagttttttcgagttgggtttattaagtagtttttattttgtttttgatgttttaattaaaaaattttttaaattttttttgtaggagtttttatttaaaggaaattatgtaaggaagtttaatatataaaaatgttaaaaaataaaaattttaaaatttaaaaagttaaggtgtttcggtttaagttagggaaaggggtttgaattttattttattttaggatttggttttttataatttgtttatttttagtttttacgttattaggttggtttttaaagaatatttgagtttacggaagtaggatggaaaatttaggatttatttagaggtttttatttattaggttttatgtgtttaatatagagtttagaataaaaataatattagttatggtgatgagattggttatgggatttatttggggattatgagtaaatagatttagtttttgtttttacggagtttatagtttcgaggggataggtatttttttgggtttatttattaggttgtatttgggttgtgtttattgtttgtttgtttttttggagggtagagtagatgttgtttggatagtatttaggatagcgtttgtgttttttggatagagatttttagtttagtattgttgatatttgggttttataagtagtttttgttttaggggttgttttgagtacgggaggaggtttagtagtatttttggtttttgtttattatatgtttatagtatatattttacgttgcgattagtaaaagaatttgtaaacgttgttaaatgttttttggtgcgatatttatttttttttggaatagttgattttagtaatttttagtaggtaatagtatttagaaaatgttagttggatgtatttttatttaatttagtgtatgcgtgtatatacgtatatatatatatatatatttttaaatgtatttatatatttttttatattgatatatttgtaaatttttatttttatatttagatatttttatatttatatatttatatttatatatatatatatttttataaatatatttatttttatatatttatatttttttatatattgatatatttttatttttatggatttttatatttatagttatttatatttatacgtatttatacgtatacgtgtattttttattatttttatttacggaggagggggttgggtttaagcggttgttagttgttttgagtttattttgttggttgtagtataggggttggagtggagttagatttaatgtttatattttttttttattttattttttttaaaatattttttttgggatttaaagttattatttgagaattatggaaggatttagttttggtagaagttgttgttttttggtgtttgtgatttttttttgttagtaggaaatggtaggtgatacgtgatttggtttggcggttcgagttggtgtttttatttttgtttttttttttcgggtatttgaggtttttacggtttagtaagtgtggtaggtggagtttgtttttgggtttgaggtttttgttggattttagtttttgttttttttttgttttatgtaaagttttaattatagaatgttgggatttattagaaagtattaaagaggttttttagtaggtggggtggtaaggtagggttatatatagtatggcgggggaattagggttgatttttagtttattagttttatttttggagtggtttgggattgataaatcgtgtttttatttttaaggttatttttgttttttaagaagtatagaagaaatttttttagtaggttttttttagttaaaatttagtttagtattaaaaatagggttttaggttatagtattagttgttagtttgtatttttatttttttttttatttatttgtttgggaggaatttcgagaagattaatgttagagaagcgaaaggtagttaggagttgggggaaggtttgtaggttatggtgttattatttattagttttgtgattttgtataatttatcgaatttttttttaaaaatgtattatttattttgttttttagagagatagggttttgttatgttgtttagattggttttaaatttttgggtttaagtgatttttttatttcggttttttgagtagttgagattataggtatatgttattatgtttggttatttaatttttttgttttagtttgtttgtttgttaatgggtatgttaatttttgtttttaatgattagtagtggggtttaaatttaagaatggtatggagaattaagtaaatagttgtttaatttattaatatattttttttttagggttgttttggagatgttaggatatttgtgaggatgtggtttgggttttagttttagagttttagcgaggagagggatatatggaaaatgtttagtaaatgttattaaggtttttgattattaggtttagtgcgttattattggggtttttttttttattagtattgtttgttaatgagtaatgagggtttaagaggggttatataaatatttttttagtttagtagatttaggagagttagaggagagttggattataggtgttaggtaaagttaaggttaggatttgttcgaggaagaaaagaacgtgattcgtgattttgggatttgggagggtagtgggtagaggtatttttagtaattcgatattatttgagaattgtttaatagtttttgggggattgagggggatatatagagtttgtgatttttaaaaattttagtggggtagtaggaacgttggtttaggaattagggtatggggattttgttatttttttattttatgattttgagtaagttattttttttttgggttttggtttttttatttgtaaagtaggtatagtgtacgtttatggagattacgttgtttataataaatttataggtaaatggaaatttaggtaggaaggtgttttattaagataaaagggttatagggttttattaaggttttgttaggtttagttttggttagattagtttcgtattttggattaaggtttttatttttgttagttttagatttttgtttgttaagattagtgttttgttttagttttgttatttatttgtatatttttttgagtaaatttttttgggtttcgttataatttttatagggtgaggttgaaggggtatttagtagagaaatatttatgatttgttttagaagttttaggtttcgtttattaggaagagtagttataggaaggtaataatgtaattttatatagatatattataaaaatagtattaggaatagtatttgtggtattaattggattttaaattcggtattttttttaagttttatagaaattttaggagggaggtgttagtatgttattatttaatagacggggaaattgaggtattaagaggttaagatgtgtgttttaagttagtaagtattaagttggttgttttaaggttaaagtaattttaaagggaatgttgataatgattttatattgttttaaatatatttatagtttttattattattcgtggtttagatataacgttgtaaggtgggttgtacgtgattatgaggtttttagcgtgtggaggttagttgggatagttatatgttttttttttattttgtagttattattgagttattatgagtaggtttgagtttttggtaaaattagtattttgaatttttttttttttataatatttagaaggttttttgtttttagtttttttatagtatttttttaagacggttaatttaatgttttggaaaagtatttatttagtatattgttttatttgttttttaaggaggttgtttcgggagaggttgggtattatatttagtttataaatgggtaatttgaggtttaaaaataaatataaaggtttatttgatttttaaaggttatatgtttagatttttttttattgagggaaaggtgaaaaatttattggtttgttgtgggtgtaggtgtggtatttattttttcgggggagggcggataatagttttttggaggtttttagtgaagtagataaagggagagtaggcgggaattgttgataagggtagtatcgattgttattaatagtaattggtttagattttattttttgtaatatgtttggttttaaggttatatgaaagttagtgttttttttagtatattgtgttttttatagaatagatttttaaaaggagggaaaaaattaatatgtgttgtggttgtttgttgtagtaatttttttagaaaattgtcgagaatagtattatttttgtttgaattttaaggaaaattattttgagataggttttggatagttttgttttattgtggatataattttttgttatttttttgtttaaagagattttgaagttaagttataaagtagtttatgggtttttttggtgttttttggtttttttgaaatttaaggttttggggagggtgaggaagttggtagtttttacgaattgttttttttaattaattaatttagtaaataatatgggtggatttattggatttttaagaaagttttttagtttagaggttagggaattgtattagagtaattagaattaaggaaatagtataaatgttagagaataaaattatagtaggaatttttcgagggtttttgtattttgtagtggagtttgaaatttaggaggtattagtgatgtttgatatttaaggaatgaaaaagggattattaagaaggtgaattttattgttttttttttaaataagttaaagtcgtatttattttttgggtgtgggtttagaggggttggagttgaaattgaattgttgtgtgtttaatttgagtatagtattagggaggttagtaagagtgttttaaatataatagtaggaagagggaggtgttaggaatttcgttagggtttattttttttttgtaatataatcgagatttttttggagatttttagtggagttttggtagtacgagtaatttgtttggtagatagaagacgatcgtttgaggggacgaggtgaataattggaagtttaaaggaggatattggtttttttagaggattattttgtgaaattgtaagataggtatgagttgcgttggatggtttgagataatttgtggaaattatataaacggagttagtgttagtagaggacgaggaaatggtttttttatatagaattttttgtttcgagatgggatgttagttacgttaataggatttttttttagaatggttttgtagtttttatttttcggaatgggttttcgattttgtttatgtaagatggtttaagttatttttttaattagtggagatgttttttttattattattaatataatatttattaaggataggtttttaggttttatgggagatatggataggttttaggaaggatttaatttagttttttttttagtagaggatagttaaggaggtttttttggagaaaggaggagagttttatgattaaaaaggaggaaggagagatggtaagtatttttagttgagagaggttatagatttattttttaaatggtttttttatatttatatttgaagagggttatttggaatttttttaggtttcgtgggggtggggtagagggtgaaggtaggagaataaggtggagatttgggtttttatttatttttttttaaatagaattttatgtagatttaaaatgtatagttgtagaaagtttttttatagatttaaagaaaggaaagattaaattgttggggagggtatttaaggtttttagattgttaaggagttttattttttattagtttagttgtaagaaaattcgttggatttaaaaggttagagatggagtttaggtaggtagggtataggtaggtttgtaaataatgttaggtgggaaagttaaagatttgggttaaagagatttgtttatggtttcgattgtgtaatttatttttattttgtagtgttggggtttacgttttattcgagggagtttaggtttttttttatatggtttttatttcgagaatacggttttaggttggtatttatttatggttttttatttttgtagtcgtttttttgtggggttttagtgtttttagtttttttgtttatttgtttgggttaagtttttagttaagatcgttatttagtttgtttttatttttaagttgaaagataaaaagtaagtggatacgcggtatttttattatatagttattaagggaggtaggaataatagtttggggtggatttaggaaataagtttttttttaaaaggtgggtttagagggtgtgggtggtttttaagcgtaatgttggagggtggaaagggtttaggaggtttattttgggtagaattttatttattggattttggatagaagagttattagtttgagttttaattttttgatttgagaggtggaaagaatgttttttattttagttagttgatgtgatgtattgaatttttaaggtattatagtaaataagagttatttattgagtatttattaattttttggtattgtggatatagggtggtttgaaggtatagcggtatgtatgattatattttttttttttttttttttgttattttagagtagaggtttttaattttgtttgtttgtaggatattttatttttaatttagttaaaggagttttgaaataatagtatattttttgatggagagagaatcgtaggagatcgggtttggaaatgtgtattttagataagatttttatgatattattatgtaatttatataagtttagtaaaaagtaatatttaggttaagtatttgtaggtatttttatagttttgggtaggtttaggataaagggttttagattttgtttgttaagaagatgttttgagaatgttttttgcgggtgttattgacggtaaatatttatacgttgttttttatatgtttagtgttgtttttaggttatatagattaatatttatatattttgatggtattatgtttgttatttttattttatagaaaagtaaattgaggtatggagtttttgattgtttttttatttgagtttgatttttttaggcgttttaatatgttgttatggaaaaaaaataaaggttttgaagtttaattgttcgggtttaaagtttggtttttttatttgagttatatggtaataggtaaattttgaaatttttttggttttagttgttttatttatttaatggagtaatacgatttaggtaacgtttttgcgaggatgaaggtagatggagggagatagtggttgttttggagggagagagatgtcgtgtttttttttggttttttttttaggttgagttaaatttgaattttgtttgagttttagatgttgagttattacgtttttttttttaggataaggtttttgagttatatttggaatgggattttttggggttgggttttaaggaagaattgtagttttgggttattcgaaaaatataatgttattttttttttaggtttatgaggaggtaagtttaggttagcggattttaacgtaatttaggggggtttttagtttagttgagatttgttttttgttatggggggggggtagttttatttagttaaaggttaatttagggggttgtagtttttaagtttttgttttttaggttggttttgttaattttttaagaatatttgatttatatttaaaaaaaattatttcgttttgtttttttggttttaaaagtttttttattagaaatttaatgaagatgtaattttttttcgtttttttatagtaggtaggtaaaattttgttaggaattttttttattgtttttagttttatttaggagttttttataaagttgagttttagtttagttcggtttgggtatatttttttttatttttgtgttttattttttatttgtaaaatggaaagaagttggattaggtaggttttgtgtgagttttttattttattttaaatgattaaattttgttgttttaaaagaatttttttataagagatttaaatagatattttaggattttttaaaagtaaaagttaatatttttatttatgtatagtttattatttcgttcgaaatttaatttgttggtttataggagaatggggtagaagatttagagttatttattttattttatgtgtatattttaattttttttatttgttaggcgttgggttaggggttaggttatagggtagggtaggtaaatttttttttttgtttagatgtagtgggagatacggttttataaagttaagaagttataggttaggggaatatttagttttttatttatattaaaatttttttttttttttatatttttttttattttcgatattgtgttattttagtttggggttggttttgtcgttatatatattatatagaatcggtttgcgtttttagtcgtgtgttttttttattagaaggtagtttttttaagaaaggcgttggggtttgttttttttgtattttgtttattttaattatatttgtgaaatttaataagaacgttagaattttttaataggaagagtttagattgaaaaattcgttttgaaattatatttttgtagtaagaatagggggtttgtatttagatatgtttttttgaggtagtttaggagaaggtttcgtgtagttgatgggtattataaggatgtttatcgtttttttgtttggttattggttgatttttgaatattagatattttttagtagtttaaagaaattaaataaattgaagtgtttttagcgttcgtgaggaaggggtgtttttggatgggtataagataattaagggttttgttttttttatttattgttaggtattttttatttttaagttatagaggcgtgttgtttaggatttttagggatagtagggataataggcgggggatatgggggaggggtgggtaaggaatcgatttattaaattttagttttagttattaatttgatagaggcgtgatagcgtgttttttttagaattagtcgtattttttaagtttagttcgaaattttttttcgaggttgaattagagatcgcggcggattttttaggaacgtcgaagtaattttagttgttttttttcgtggagggtaggagcggttagtattagaggtaggggaggggaggaaagcgggggagggtgggcggaggcgaaaatgacgttatttttagttttagttagtttaaggggtcgttaaatgttcgcgagatttttttcgtttaggttattttttttacgtcgtcgatgcgttaatttcgggttttttcgggggcgtattttgtttagtggcgttcgtagatatttgtttcggttcgcgtgttgtattgtgatatattttggattttttttttatatatacgtttatatttatatatgtatatcgttttgtgtgtgttacgggattgaagcgttattagtttttcggatttatattcgttttcgatttagtttgtaagttagatatatttacgtttttttttttagtttttttgttagcgttatttatttttattaattttttatttatatattcgcgcgtaattttttcgtttttagatatagatatatatatatatatatatatatatatatatatatatttatttagttttttttgtatttacgtttagcgcgtatttttgttagcggcgttagttgggattcggagacgacgttaggaaacgttattttggtattttttcggatcgttttatcgtttttttttcgatttttagaattttaatttttagttaggggggagatgaatgggattttgtttttttttttttttttttcgtaattgaattttttattttagcggtgtttgtatttaaagttttttcgcgttcgcgtttcggggtgatcgcgtatttgtagtttcggggcgtttatttttggagtacgcggggttataaagggcggttttggcgttttagcggtatcgtacgggcggtttttttttgtttcgcgtcgcgtttgggagaagagggcgcgggtttatttaacgcgagggagaaaggaaaggacggtgtcgaggttggcggtttagcgtttcgcggaagtcgagggcggatggtgaattgacgagttttagtattagttgggagttaggcgaggtttgtttacgttcgggcggagggcgattttataggcgtcgcggtttcgttttcgcgtttcgttttttttagattttcgtagttttagtacgtagtcgggatatatttttttttcgttttttgtttttttttttcgggcgcgtcgggttgggttgggtttcggtagcgcgcggcgggcgtttattggagtcgtcgtttgttgcgtaagtagtcgtaggggcgcggtcgggaggggtatcggggttcgggttgtgggtcggttttgtagtttttttcgagtttagggtttcggtttgtgtagcgggcgcgtgtgttttgttcggaggaggcgtttgtgtgtttgtgcgtgtttatgtgcgcgttcgtgcgtgtgtatgtggatttttttgtgttttcgtatgggcggaggttttttatttttgttttagagttttttttaagagtttcgttgcgttacgttttgagcgattttttttattttttgtaggttttattagttcggttttttagtcggattcggttgtttgtttagtagtcgttttcgttttcgttcgataggtttttttcgatttttagtttttcgtgtcgttaaagttttcgttgaaattttcgttttcgtttaatttcgtttattttgtttatcgtcgtttagcgtttatttttttttttatttttttagttttaagtatatttattggattttgtttattgggttttttttttttgttttataagtttagatgagaggatttttatttttttttattttgattttttgaatttttatgatttattttttttaattttagtatcgttttgttttgttgttttgtttgtgcgtaattattggtttgtatgtttttatttggttaaagaaattagtaatttttaatttttattgtatatgagaagttttagaggagtcgttaaattaaaaaataaataaatagatagataataaaaagagagagatggattttagaatagtttaattagaattttagggggtgtaaattaattgggtattggggtttttataaagttatttaggtggtttttgacgtgtagttaggttgagaagtattgtatggaggaatatgattttatgaataaaggaagtttgatttatagttggtatcgttattgtttttaggttatttgtttagcgttgaatttgttattgagtttaggattagatttagggtaagtttaggtgattttttttgcgtttttatagatatatacgcgcgtacgtataatattttttgttgaattgtaaattttttttttgtgttaatttatgttgtttttaaggtaggggttatggtttttttttttgattattagggttagttttggagaagggttttttggaataaaagaaatatggagaggggtaaatagtatttttaggatttaggatatttgtgttttaggtttgtttttgatattatcgattataaattaataaatttgggttttagaatttttattggtaaagggagaggattagatttaatgattttttagaatttatttagtgttaaagttttgttattttattataaatgattagtgtgaagaatagagttttagtgttatgggttttgttgttagaagagtttggttaaattataaagtttggttattagttatgaagtttggttaaattataaagtttggttatatttaagaatgttttgaatgtaggagtatatttttttattttagaaaatttaatatttagaattaataagtgaatgaatgattattgggtagttttttattttttatggatttgaattagtttaattgtagtatttttagtgagggaaaattttttttattttaaataaaatgttgtgtttaggtagagtggtttatatttgtaattttagtattttgggaggttaatgtagaagttttttttgagtttaggagtttgagattagtttttataatatagtgatgttttatttttataaaaaagatgaaagttagttaggtttggtggtaagtatttgtagttttagttattttagaggtagaggtgggaggattgtttgagtttaggagttttagaaaagtttgagtaatataatgagatattatttttataagaaaataaaaaattaggtgggtttagtggtatgtagttgtagttttagttatttgggaggttaaggtaggagttttgtttttttaggttttgaaatttatttattttgttattttataaatgatagaattgagttgtttttatgagttgggttttgtatttcgttattgggaaaggattgaaaaggtaaaaatattttttataggtgtatagtatggtatagttttaagacgtagtttttttatttatatagcgtggttgagatgaatttatttattttttaattatattaaggatttattatgtttaggtattattttagattttggggatatgattatgaataatagtaataataaaagtgtatttttgggagttattttgttgtttaaagatttttttagattaagtagtttgtgtgtttgttattttttagttagtttatatatatttatttttttataggttttttattgcggcgatttattgagtgagtatttttggttttttatttgttaaagatataagagtgttaagtttaaaagtgcggagtgttaagataaggaatgttaagtttaaaggcgtagggaaggcggtttatttttttagtaataaatggaattagtgtatggaattagaagggtattttgttaggggaggtttttgtttgtttttttgaggaggtttttaggatagaatgcgaagagtagtttagatttgtagtttgaaatttcgaggaggttgtttggtaggaggttgggtttgtgtgggaagtttaattttttggaagattattagtattgaataggttagaagatagaggaaggagagtggagtgaagagaaaagagtagagaagggaggtaagaatttgagtaatggaatataattttttaagtgatggtattttaaaattagagtttatattattttggagaaggtttgaggaagatattatttggattttatattttttttttttagtttaatatagttaattttttttttttgttgaaaaggatgttttttttcgttgagtattagatgaagtagtttttttagttaagtgttacgttgtaggagaaagattgtttttagtataggtttggatgtatataaagtatagaggacgtttattttatatagaggttttttattgggatttgggagttgtatgtatttttatattttttatcgtagttagttgaggtggtagaagtttacggagttgaatgtgggtgtaattgtattgattgtttatattatttttttttttcgttggttagtagtagaattagatttgtttagtaaatgtatacgcgttgtaaattcgttataggatgagattggattttttggattaatgtttattggaaatttttatttaataataatttagattttatattagaatattttaattaaatgttttaaaaatgattataggaattatttgtttttaattgttttttttaaaatttatgggtattcggggttgggagagattaagatgtagtagggatttatggagaagaattcggtggtttgtggtttttagttttaattttattatttatgagttgtagtatttggggtaaattattttatttttttgtgtatggaggaaacgagtgagagaaattattagattttttaattataatttatgggtttattgttgtagattattattttttttgtttgttaaaatgaaaaagtgttcgtaaaagtgtttttttatttttagttttgggttttttcgggatttttttttttttttagtatttattttttttttttttttggattaaattaattaataagtaaatatttattgtaattaatgatttattttaaattaatttttttttaattttaagttttttatttttgtattgtagtttaattaataagtaaatatttattgtaattaatgatttattttaattaattttttttgatttttaagttttttatttttgtattgtagtttagttttttttatttttttttttttaaattttttaaaataagtatttgtatttaaaggtttattttatttttttttttttttattttgtagtgattattaagttttttttgaatttggttaaataagtttttaaaatttgttaggaaaaataatagtttttgtttttttatttttttatttttttatttttagaagttattattttttgtttttggagaattatttttattttatttttgttatttgtagattttatgtttttgggtaagttattttattttttttttttgtttttttatgtataagatatatataataatatagggttattgtgataaatatatgtgttaatatatgtaaagtgtttagaatagtttttggtatatagaaggtttttattaaagtgtttatttttatttttattgttattattattattattattattattattattattattattattttgttttattttttttggtattttgtatatttgatcgtagagaagtttagtaaatattggttgaagaattgagtaaatgtagatgtttttttttgaatttattttattttattcggttttattgtttggattttgttaggagggaaaaggggattttatttgttttatgattttaggtggagggattgttatttgggatttttatttaagtaaaagtaaattattttagttatttgtaagtatgtttggtttgtaatattatgttgtgagtaatgaaaattaaaaaaaaaaaaaattatgaaaggaaaataattttaaatgagggtgaagggtaggttatgtttaggatgtgtaataaattttttattttgaatataaatgaagagttgtgtaatgt

SEQ ID NO: 174 - DNA, 5987 bp, Artificial Sequence
  chemically treated genomic DNA (Homo sapiens)
tttttaatttgtattattttttttattttaataattttttttaatattttttataaagtagatttattggttatagaatgttttaatttttatttgtttgagaaaattttattttttttttatttttgaaagataattttgtagggtatagaattttaggttgtaggttttttttttttaaagtgaaatattttattttattttttttttttttgtatggtatttgagaagaagttagatgtaatttttattattattatttaaaagattgtttttgtttttttttttttttttttttttttttttttttttttgtatattatattttttatagttgttttatattttttagatattatgttttggtttttttttgtgtttttttttttgatttttagttttagaagtttttatttatatatttgtaatcgtagggatttttttttttgttatgtttagtttattaataagtttttatagatattgttgatttttgttttagtgtttttgatttttagtatttttttgattattttttggaattgttatttgtttatttatattattaatttatttttgtgtgttgttttattatagtaattgtagttgttttaattttataggtattgtaattttaatatttttattatatttgatattgattttgatgtttgttttgttttattaagttatgtttttgttttttagtgtgatttttaattttttgttgaaagttaggtatgatgtattgagtgaaagaaatttaatatattgtaatgtgacgataagagtttaggggaagtgaagtattttatagttttatagtaggtttcggttttttagtgagtttgtgtttatgaacggtgatttttaataagtgttttttattttattttttttttgtttttaagtgggataagattattgggggggggttagaattgggtattttttttttttaatgtagaagttaaagagagggttggagttgggtatttttttttttttgtatggaaagttagaggtagttaaatttggatatttttttttttttaatttagttaggttgcgataaaaatttcgatagtttaggttttaatattataaaataattttttttgagtataggttttattaagaatattatattttgatggagttgagggggagttttttttgatatttattgcgagaatttcgtagagttttaggaagtaaaatttataaaagtgtgggagttttttagaattttttttttgtagatttatttgtattgaatttttagaaatttattaattatagtttaggtttttttatttaggtattggtttttatggaggtttttgtttgtgtatttttgttttagtaagttgttttttttgtatggtttgttttttaaattttttaagtagggttatgatttgtcgttttatttttttgatagttttgagagtgttgattttttagtttgtttagatttttatttgtttttaggatgaagtgataatttttaagtttttttttgatatgttagattagaaattgaaagttttaagttttatattttgtgcgtgggtatgtttatattttgtttgttttagtgtttttattttatatttttttttttttttttgtttttttgtgagatttttaggtttaatataaagattgtgtttaatttatttaattattttggtttatttgagtattataatgaataattataaaaaaaaatgaagtaaaagaaaaatttattaaagaattgagatatttgagaaaaagaaaggagattagtgttttataaaatttagaaatagattttttaagtgtttttttattgatttatgtgaaaggattttttttaatttaataaattatgtgttttcgtttatagttttaaaattttttgtgtagttaagaatgggtaaataattaggttttattaaaggattaacgtaaagattttttgtaagtaatatttttgttatttaaggaagagataaattttatggtataattttgttaaagtatattaagaataattttgatataaagttttttttttagttaatatgttatgaaagaaagaagataaggggtgatttttattttttaagtgaattattaaatttattaaagaagaaacgagggaaatagaaagaggatttttgtttgagataatggatttgtatgtatgagtagtagaattttgtttaaagtataaggaagggaaaaaaaagttagtttatttggaattttggatattaagagtttttattgtttatttttttttaatttatatgaatggtttattattttaattaataaatattttatttttttttaatatatttatgaaataaatttgaaatgaatagtgtaatatgtgaatgtttagaatattataaaattaaatataaaatttgtttggtaatttttttagtattttaggaaaaaagttgataaaattttaagtagtagaagggggtagtaaaatttaatagaaagttttggaagatttttaagatttttttttattttttttttatgtagattattttttaataaattttagacgttaatagaaattttgtataatagatttatatatttgtttaaaatagatatagaaatattgaatatatgtaaatatgagagttataagttttatatgattaaattttttttttatggtatataatagttatagtatttttttatataaaataggtttagtggttttaatttagtttggtatatttaatatatttttatgattagtattttaaatgtatttattcgttttattttattgttttagaattgttagttatttaataaattatgtaatttttttttttatgtttagatttgtatttttttttaaaattttgtttatttttaaagttttagattttttttgaatttttttttttgattttttaagtatatggaattttttattttattttgttatataagtgatagaatttttattatgggatagatggagtttaatttttttgagtttaaaataatttaaatataattattttttatgttttgttttttttttatttttgtatttaaatttttttttagataatagaataattaatgtttgataaggaagataatgatgatgattattttaaaatgaatttaggattgtaatgtaaaattttagtatttttttatagtatggattttaatatggtttttaatttaaattaatattagtagttttaattataaattttaaattttagtagatgtaatttatttttttaaaatgaaatagaagattgaaattattaaattattaaaaagaaaatgatttacgtttttagttgaaattttatgtaagattttatgtaataaataggagtgttataaatggaatgatgaaatatgattagaggaggagaaaggttttttagatgagatggaattttagttattcgtgttttatgaagaattagatgtgtatattaagtaaaatagttaaaaaaaaaatttttaagtgagttttttatttattttttttttataagatttttataaattgaggtatttggtgtagttttattttaggttttatgttgttatttttttgtaatgttaaggatttaggatataattgaattttttattttttattttttttttggtgtgtgtgtatatatatatgtatatatatatatatatatatatatatatatattttttagtattttatttttatatgtttttttttgagtattatttatgatagatgttaaataaaagtaaagatgaaattttaattgttaaaattttttttttatttaattaattttttatttaattatgttttaaaacgagaatagaaaattagttttaataagtttaggtaattgaaaagtaaatgttatgttgtattttgatttatggttataatttataattttggaaaagtggatagaaaagataaaagagtgaattttaaaattcgaatttattttattagtattttttatgaagggttagtaattaaaataatttacgtattagggagagaaatgttttaaggtatacgttttggatatttagcgtttttgtaaattttggttatcgtcgttttttttgtttattagaaggtaggaaattttatattggtgattcgtggagtttatattaattatttatagggtaattgtttaggattagtattatgaggagaatttatttttttcgtttttttttttaagaaataaggagggggtgaaggtacggagaatagtattttttttgttgaaagtaatttagttataaagataaattatagttatgtatattgaaggtagttattttattttataaaataagagttttttaaaaagttatgtatgtatgtgttgtatatagagtagatatatagtttattaagcgtcgttattaaaatataaaatatgttagttttttttaattttattcgttttagtttgtttcgacgtgattttttcgattttttaaagacgtatagattagatacggcggcggcggcgggagaggggattttttgcgttttcggattttagggtcgtttagatttttggagaggaagttaagtgtttttttgttttttttcggtattttatttaaggcgattagtttagaattggttttcggaagcgttcgggtaaagattgcgaagaagaaaagatatttggcggaaatttgtgcgtttggggcggtggaattcggggaggagagggagggattagataggagagtggggattattttttttgtttttaaattggggtagttttttgggttttcgatttttttattttcgtgggtaaaaaattttgtttttatcgggtttacgtaatttttttaaggggagaggagggaaaaatttgtggggggtacgaaaaggcggaaagaaatagttatttcgttatatgggtttggtttttagttttataaaaaggaaggttttttcggttagcgattaattgttatacgatttgtagtgagcgttaggagtacgtttaggaattttttagtagcgttttttttagttttatagttagacgtttttagatagtaaagtttattttcgcgtcgcgttttgttcgtcgttgcgatgttcgttcgcgttttgttgttgtgcgcggttttggcgtttagttatataggtgagtatttggcgtcgcgtatcggggatttcggttttacgtattcgggtagagttttcgttttgattttttgggtttattttagtatttcgattttttttcgaatagagaagttacgtgatttgggaaagagtttggatcgttagagttcgaaagaatttcgtggatattttagtttttttataagtattgattattatgagttagttatttaatcgatttgagatatttttattttttaaatagggatagatgatattaatttgtaggttgttattatgataagataggatttgattaatatatgtgaattgtttatatttggaatttttttattgagtggaagaagttgttttaaatattttagttagtttttttttgtttttaggaaagttcggattatgttttaagataagtaaaatgttttaaaagtaagttgttttattttgaatttttttttaaatgttgattagtgtattagatttattttaatttggaaagtgaagtgttatttatttgaattttttaaaaatgttaattttaatatttaaagagttaattaagaaaagtttagtaatatgatgtattaagttgaatatgttgttatttttatttagaatagaaaattggtatttttacgttttatttattttaaggtaggttaaaaaattgtatttttatgattatttatatattttttgaatttattattgtaaagttgatttatagttaaataattaaatgtttaaattaagattaagatattagagaatgatttatttgttgttttttaattgtagt

SEQ ID NO: 175 - DNA, 5987 bp, Artificial Sequence
  chemically treated genomic DNA (Homo sapiens)
gttgtaattaaaggatagtaaataaattattttttagtgttttaattttaatttaaatatttaattgtttgattatgaattaattttataataataaatttaagaaatatataggtagttatggaaatataattttttaatttgttttagaatggataaaacgtagaaatattaattttttattttaaataaggataatagtatatttaatttggtatattatgttattaagttttttttagttaattttttagatgttaaaattagtatttttaagaagtttaaataagtagtattttattttttaaattaaaatggatttagtatattaattaatatttagggaaaaatttaaagtaaaatagtttatttttaagatattttgtttattttaaaatataattcgggtttttttgggagtaggaaagaattgattagaatatttaaaataattttttttatttaataaaaaggttttaaatataaataatttatatatattgattagattttgttttattataatgataatttgtaaattagtattatttatttttatttaggaggtgagagtgttttagatcggttaagtaattggtttataatgattagtgtttgtgggaaagttggaatatttacggagttttttcgaattttagcggtttaagtttttttttaagttacgtagtttttttattcggagagaagtcggagtattgggatagatttaggaggttagagcggaaattttgttcgggtgcgtggaatcggagttttcggtgcgcggcgttaggtatttatttgtatggttgagcgttaggatcgcgtatagtagtagggcgcgggcgagtatcgtagcggcgggtagggcgcggcgcgggggtaggttttgttgtttgagggcgtttggttgtggagttgaaggaggcgttgttgaggagtttttggacgtgtttttgacgtttattgtaagtcgtatgataattggtcgttaatcgagagaatttttttttttataagattgaaaattaagtttatgtgacgaaatgattgttttttttcgttttttcgtattttttataaattttttttttttttttttttaaaaaaattgcgtaagttcggtgggggtagggttttttatttacggaaatgagaaaatcggaaatttaggaagttgttttaatttgggagtagagggggtagtttttatttttttgtttgatttttttttttttttttcgagttttatcgttttaggcgtataggttttcgttagatgttttttttttttcgtagtttttgttcgagcgttttcgagagttagttttggattgatcgttttggatgggatatcgggggagggtagaaggatatttggttttttttttaggaatttgagcggttttgaggttcgggggcgtagggaattttttttttcgtcgtcgtcgtcgtgtttggtttgtacgtttttagagggtcgaggaagttacgtcgggatagattggggcgagtaaggttaagaaaggttgatatgttttatgttttagtgacgacgtttaataggttgtatatttgttttatatgtagtatatatatatatagttttttaaaaaatttttattttgtggaatgaaatagttatttttagtgtatatagttgtaatttatttttgtagttaagttgtttttaatagaagaaatattgtttttcgtatttttattttttttttgttttttggaaagagaggcgggaaaggtaaattttttttataatattggttttaagtagttattttgtaaatagttaatgtgagttttacgggttattaatataaagttttttgttttttgatggataaaggaagcggcgatggttagaatttgtagggacgttaaatgtttaaaacgtatgttttaaggtatttttttttttgatgcgtggattattttggttattagttttttataggagatattggtaaaataaattcgagttttaaagtttatttttttgttttttttgtttatttttttaagattatgagttgtgattatggattaaagtataatatagtatttattttttagttgtttgggtttattggggttaattttttattttcgttttggaatatagttggatgaggaattaattagatggaagggagattttgatagttggaattttatttttgtttttgtttaatatttattatgggtagtgtttagggaggagtatgtgagggtgagatattaaaaaatatatatatgtatatgtgtgtgtgtatatatatatatatatatatatatatattagaaaagaagtggaaaatagaaaatttagttatgttttaagtttttagtattataggaaaatgatagtataaaatttgaaataaaattatattaggtattttaatttgtagaagttttataagaaaaaaataaataagagatttatttggaggttttttttttaattgttttgtttagtgtatatatttgattttttatgagatacggatgattaaaattttattttatttaggaagtttttttttttttttagttatattttattattttatttatggtatttttatttattgtatggaattttatatgaaattttaattaagagcgtggattattttttttttgataatttaataattttaattttttgttttattttaaaggagtaggttgtatttattgaaatttgaagtttatagttagagttattaatgttagtttgggttagaagttatgttagaatttatattgtgagagagtattaaaattttatattataattttgaatttattttgaagtgattattattattgttttttttattagatattaattgttttgttgtttgaaaagagatttggatataaaagtgagggaaaaatagggtataaggaataattatatttagattattttaaatttaaaggaattgaattttatttattttatagtggaaattttgttatttatatagtaggatagagtgaagagttttatgtatttggaaagttaaaaaaaaaagtttaaggagaatttgggattttaaggatgggtagagttttagaaagaagtgtaaatttgagtataaggaaaaaagttatataatttattaaataattgataattttgagataataaaataaaacggataggtatatttgggatgttggttatgggagtgtattaaatgtgttaaattaaattaagattattaaatttgttttatatggaaaagtattgtgattattgtgtattataaaaaaaaggtttgattatgtaaaatttatagtttttatgtttgtatatatttaatgtttttgtgtttattttaggtaaatatatggatttgttgtataaaatttttattagcgtttgaaatttgttgggaaataatttatatgaaaagaaaataaggaagaattttaaaaattttttagagttttttgttgagttttattgtttttttttgttgtttgaaattttgttaattttttttttaagatgttaggaagattgttagatagattttgtgtttaattttataatgttttaaatatttatatgttgtattgtttattttagatttgttttatgaatatgttgaaaagaaatgaaatatttattaattgaagtgataagttatttatgtgagttaaaagaaaatgaataataaagatttttaatgtttaaaattttaaataaattaattttttttttttttttttgtattttgagtagggttttattatttatatatatagatttattattttaggtaagggttttttttttatttttttcgttttttttttggtgggtttagtggtttatttagagagtggagattattttttgtttttttttttttatggtatgttggttgaaaaaagagttttgtgttagggttatttttagtatattttggtaaggttatgttatgaagtttattttttttttgagtagtagaaatgttatttatagaagatttttacgttagttttttagtaaagtttgattatttatttatttttagttatataagaagttttgaggttataaacgaaagtatataatttgttaaattaagaaaagtttttttatataagttaatgaagaaatatttaaaaaatttatttttaagttttataaaatattgatttttttttttttttttaaatattttaattttttgatggattttttttttattttatttttttttgtgattgtttattataatatttagatgagttaaagtagttgaatgagttgaatatagtttttgtattggatttagaaattttataaggggataaggaagggaaagagagtgtgaggtgggggtattggagtaggtaggatgtgaatatatttacgtatagaatatgaggtttaggatttttagtttttgatttggtatgttagggaggagtttggaaattgttattttattttaaaaataagtaaaaatttaagtaaattgaaaaattaatatttttagaattgttagagaagtgaggcgataggttataattttatttaaaaaatttgaaagatagattatataagaagaataatttattggagtagaaatgtataggtagaaatttttatgaaaattagtatttgggtaggaaaatttgaattgtaattgatgaatttttggaggtttagtgtagataagtttgtaaaggaaaaattttggaagatttttatatttttgtgagttttgttttttggagttttacgaggttttcgtagtgaatattagagaaaatttttttttagttttattagagtatagtgtttttaataaggtttatatttaagagaaattattttataatattagagtttaaattgtcgggatttttgtcgtagtttaattgaattagaagaaggaaaatatttaaatttaattgtttttagttttttatataggggaagaaaaatatttaattttagttttttttttagtttttatattggagaagggaaatatttaattttagtttttttttagtgattttgttttatttaaggataggaaaagagtggaatgaaaagtatttgttgaaagttatcgtttataggtataggtttattaaaaggtcgagatttgttataggattatagaatgttttattttttttgaatttttatcgttatattataatgtattgagttttttttatttagtatattatgtttggtttttaataaaaaattagaagttatattaaaagataaaaatatagtttgataagatagagtaagtattagaattaatgttaaatatggtagagatgttgaaattataatatttatgaaattaaaataattgtaattattatgataagataatatataagaataggttggtaatgtaagtagatagatggtaattttaagaaataattagagaaatgttagagattaaaaatattggaatagaagttaataatgtttgtaagggtttattagtagattggatatggtagaggaaagaatttttgcgattgtagatatataaatagagatttttaaaattgagaattaaagaaaaaaatatagaagaaaattaaaatataatatttaagaaatatggggtaattataaaaggtgtaatatatagagaaggaaagaagggaaggagaagagagaaaggaatagaagtaattttttaagtaataatgataagaattatatttgatttttttttagatattatataaagaagaaaagagtggaatgaaatattttattttgaggggaaaaaatttataatttagaattttgtattttataaaattattttttaaaagtgaaggagaaataaggtttttttagataaatgaaaattgaggtattttgtggttagtagatttgttttgtgagaaatgttaaaagaagttattgagataagaaaaatgatataggttagaaa

SEQ ID NO: 176 - DNA, 5683 bp, Artificial Sequence
  chemically treated genomic DNA (Homo sapiens)
atggtaaatatttgaaaaagtttttacgttgaaatttaaattagattatatttaggatgttttataaggtggtattttttattaagatgataaaggataaatattggtggagttagagaggttgtttttaaatatagttttttttattagtaatattgtagtagtttgtatttatcgtttagagtatgaaaaagatttttgttaaagacggtttttggggatttattattattatatgttaagagtttgttttttatgtttttatttttttattttgttaattttttttatttttatttttcggtttagtgtgagattttattattttttttttttatttttttttttttatatttttggttttttagtaggttaatgtttttgtttttttattggaatttatttattttggttatttttttttttatgaatttgttggattatattttaaagttatttaaaagagggatataaagatataataaaatcggaaataacgtttatttttattagtttgtagttaagagtgtgtggaattagggtggttgtaggtaaagagatagggggaagggttgttttatgttatgggtaggatagtaaatggtgtaaattttttggaaagtattttagtaatataggtgaagagtttttataatgtgtttattttatgatttatttttattttttttattttaaaggaataagaagaggtttaattaaagtatgagtgaaaaggttatttaaatatagggaaaggggtcgttatgatgtttacggttttaagaaatagaaaataataatttggtttaaataataagtatataattaaagaaatttagaagtaggatttttttaagagttgagagatttagtagtttaaaaatgtgatttgatatacgagttttttttatgtttttgtttttttttttttaatattggttttatattaaatttggttttttagtggttaatagtattaaatagtatttatcggtatttttgttggtatttaaaagagatggagaaagtttgattttatatggtttttttttaaaagtaataaaggatttttttcggaagtttttagtaaatttcgttagatttgaattatatgttaatttttaaattagttattggtagggaagtgggaaaaaggggaggaggtgtttatttttaattaatatgtttatttttgtttattgagattaattttataaaagtattgttttagttttttgaagaggagtataatgtttgtgagttatttattatatttatttattaagagttaagggataattgagtaaaatggtagagttggtaggaaaatggtgagtagtttcgtttttttgtgttataattgatttgtatataaagagatttggaaatttaaatataagaattttttttttttaagtttagggttttgggtattttaagtttggtttttgtttgggtatagtggtttacgtttgtaattttagtaatttgggaagttaaggagggtggattatttgaggtgatgagtttgagattagtttggttaatatggcgaaattttaattttattaaaaaatataaaaattagttggatgtagtggtatacgtttggaattttagttatttaggaggttgaggtaggaaaatcgtttgaatttgggaggtaaaagttgtagtgagttgagattgtattattgtattttagtttgggagatagagtaagattttattttattttttattaaaaaaaaattttggtttttatatgtgaaaaaataaaagttaatttttaaaaattaaataataaagagtgttaggtgataagttttatgatagagataatgtgtgttttaaaatatatagtataaaatagatggaaaatattttatggagaagggagagtttgaattggtgtttgattgaaggataagaaaaatttgttggtaatttttttttggttttgatttttgatgtagttaaagtaaagtaatttagaattatgatttagggaatatatttagagagaaatgaatttatgatgtttttaatttgaagatgttatgattttagattattttagaatataatgattttttattgttttatatttgtaagaaatgttttattattgaaaatttgtaatatttaaaaaatttttatataaaattatagtttattttgttgttttatgttaaataaataaaatatttttttttaattatgttgttttttttaattatacgtaattttaaaattagttgtaattgatagttttttttttatatttattgttaatgtatttaggttaattttatttttaattagagaaatttagaaaaaggaaattttacggtgaaatgttatatgttttataatttttagtaattaatttttaaggatgataatttggtaaaaaagagaattggattagttttttgaaaggtttattatttcggtttatgttaattgattgttttaaaattatagtgtttttaggttgtagagatatatttaaaatggattattgtttttatattaaaggggataggtttttttttttttttttttatttttgttttttttaaagttgtatagaggtatatgaggtttggggaatatttgtagtatatgttggttggtaagaatgtgggtgaatttttgttaaggggcgtagatatttttttttttatgattttttttttttatttagaataattgaagtattatgataagaggaagggttttgtgtttgagataagtagtttttatatttgttagttttttttaataagaaagtttttttttgttatcgtataggttatttttttattggtaaagtatgatgaagtttggaaattgttgtttttgttttgttgaaagaagttaagttttaagaaatttgtagaggtatttttataattttttagttatggtagtatgaattttgaaggggtagtgagtgttggtttttattttgtttgtatagttaagtttaggggagataatttttttatataagatgtattttgtttttgtgggttttttgtagtttttaagtttttatttgatttgtatataatgatttagtgggttagaggagtttagagttatgagcggtttatttttttaagaattatttttgattgtttagtattatggagtaagtggaaagaagaaaaaaaaaatttaattatttttcgaagagtaagatgaatgttgtagaaggagaaggaaggggagggagatggatgggtgtcgattttagaatttttagatttgtttggatgaattattatttatgatttgcgggataagaatttgattttatttattaattagtagaaatttttttttttgttttttaatatttgaaatttaataaatatgtgttttaggaatatatcggttattttttagaggtattttatatatatattgagtaattagaaaatatttttttcgtaatatatatatatatatatatatatatatattattttgttatataatatttttacgtaagaaaagcgaaattgttgtttgatgaatgtaaatatttggttgtttgtagtagtcgggagttttgttaggtttaagtgttaagatgggaggtgaattttaggggtttttttttgttcgtgttgagatttttatttggttaagtttttatttatgttttggtttcggagcgagttcgatagcgttggattatagtagagggagcgaggcggttgacgttttatttcgaagagatgaatggaattttaggaagttagagttatgttggtttgggatagtggtttggagattagattttaatgatagaagtattaggtagcggtatttatggtaatgtgtgtatttatagaaatgtaatttatatttcgggtttaggagtcgaaaaatgaaaagaacgtttagggaggaaaaagggaaatataataataggtagagagtaatttattattttatgggtttgttttgtaaatagttgaagattttggagttagatggttttgtaaattttttaaataggagttacgttaagaagtacgagtgggtataaaaattgttttttaagatataattttaatttggtttgtggaaattggatacgagtaagtttttttaaaattcgagtagaaagtagttgtttttttcgggttttttgatgagaatacgtatatcgtttttaagcggtcggtcgagggagcgtcgcggtagcgggagaggcgtttttgtgggttttttggtagtcgcggtaggaaagggttcgaaggtagcgaaggcgaacgcggcgtattaatttgtcggtttcgtcgacgtcgcgtttattttttttcggggcgggcgtggggttagtttaggataggcgttcgggggacgcgtgtttttattttacggggacggtggaggagagttagcgagggttcgaggggtaggtattttaacgaatggtttttttggtgttttttgcgtttcgtcggtttatttttttttttataaaacgggtttagtttttagtatttatttttcgttattaattaggtatttcgggagattagttcgttcgaaagtttttgcgttatttcgcgggtttttttaggtggtttttttagtttcgttttttttcgggatgtttgttgattatttcgagttcgcgtggcgtaagagtacgagcgtcgagttcgtgcgcgttaaggttgcgtgggcgggtatcgatttttttgagaagttttagtgtttttaagtttcgattttcgttttttttattttttagttggaaagttgcgcgttaggtagcggggggcggagagaggagtttagattggtttttatttttcgttttttgttcggtcgtcgtttattggtcggaggaatttttaggaatgcgagcgtttttttaaaagcgcgcggttttttcgttttgttagtcgttgcgttcgagttggtttgcgagtttagggtttttgtcgttttttaggagtaatttttatttcggacgtataggtatttttcgcgtttttttagttttcgtcgttttcgttatcgttttcggtcgtcgcgtttcggtatatataggtaagtcgttttcggcggtcgtcgaggattaaagttgttcgggatatttatttggagcgttgaggttttagtttttttggtggatttcggaatttatatttttttcgttcgtttattttagttcgttttttttagtcgttggaggattttttagggtaaggttttagagttattttttttagttttgaggtttataaattaatttattaggatattttaagatttttttattttttgaagttttttttaagtttttgtattagtattttagggaagagtttgtattttttttgttttttttgtaattttaaattatagtttttgattttgtttattttcgattttttaaaagtttttaaattgttggttttgcgttttttatattttaaaattagtattttttttttttattttttttttttttttttttttttttttttatgttttttggaaagtaattttgttgttttttattttagtaaacgcggggttaaagagggatggtttcggttttgtttttatgtttagtttcgtttttgcgtatcgtttttttttgtttagttgatttttgattttcggtttttgtgttttttgttatagg

SEQ ID NO: 177 - DNA, 5683 bp, Artificial Sequence
  chemically treated genomic DNA (Homo sapiens)
tttgtagtaggaagtataagagtcgagggttagagattagttaggtagggagggacggtgcgtagaaacggggttgggtatggggatagggtcgggattatttttttttgatttcgcgtttgttgaaatgaaggataataggattattttttagagagtatgagagagagagagagagagagagagagaggtggaggaaagagatgttggttttaaagtgtggggggcgtaagattaataatttgggggtttttgggaagtcgaaggtgagtaagattaggaattgtagtttggggttgtagggagggtaggggaagtatagatttttttttggagtgttgatataaaggtttaaggaggattttagagagtaaggaaattttggggtgttttgatgagttggtttgtgaattttaaggttggagaggatggttttggagttttgttttgaagagttttttagcggttgagaggagcgggttggggtaggcgagcggggagagtgtaggtttcggggtttattagagggattgaagttttagcgttttaggtggatgtttcgggtagttttggttttcggcggtcgtcgggggcgatttatttgtgtgtatcggagcgcggcggtcgggagcggtggcgagggcggcgagggttggaggggcgcggggaatgtttgtgcgttcggagtagaggttgtttttggagagcgataggagttttgaattcgtaggttagttcgggcgtagcggttggtaaggcggaggagtcgcgcgtttttaaaggggcgttcgtatttttggggattttttcggttaatgggcggcggtcgggtaggaagcgggaggtgggggttagtttgggttttttttttcgtttttcgttgtttggcgcgtaattttttagttagaaagtgaagggggcgggggtcggggtttgggagtattagaattttttagaaaagtcggtgttcgtttacgtagttttggcgcgtacgggttcggcgttcgtatttttgcgttacgcgggttcggggtgattagtaagtatttcgaaaagggacggggttggggagattatttaggagggttcgcggggtggcgtaggggttttcgggcgagttgatttttcggaatgtttggttgatggcgagaggtggatattagagattgggttcgttttgtaaaaagaaaaatgggtcgacggggcgtaggggatattaagagagttattcgttaaagtatttgtttttcgggttttcgttgatttttttttatcgttttcgtggggtgaggatacgcgtttttcgagcgtttgttttgagttggttttacgttcgtttcggagggaggtgagcgcggcgtcggcggggtcggtaggttggtgcgtcgcgttcgttttcgttgttttcgggtttttttttgtcgcggttgttagggggtttatagagacgtttttttcgttgtcgcggcgttttttcggtcggtcgtttgggggcggtgtgcgtatttttattaaggggttcggggaggatagttgttttttattcgaattttaaggaaatttattcgtatttagtttttataagttaaattgaaattgtgttttgaaaaatagtttttgtgtttattcgtgttttttaacgtgatttttgtttggagaatttgtagaattatttggttttagagtttttagttatttatagagtagatttatagagtaataaattattttttgtttattattgtattttttttttttttttttaaacgttttttttatttttcggtttttgaattcgaggtgtgggttatatttttgtgggtgtatatattgttatgagtgtcgttgtttagtgtttttgttattgaagtttggtttttaagttattgttttaagttagtatgattttagttttttggaattttatttattttttcgggatgggacgttagtcgtttcgttttttttgttgtgatttagcgttatcgggttcgtttcgaggttagggtataggtagaagtttgattaaataaggattttagtacgggtagggggaaatttttggggtttattttttattttagtatttaaatttggtaggattttcgattgttgtaaatagttaagtgtttatatttattaaatagtagtttcgttttttttgcgtgggagtgttgtatgataagatggtgtgtgtgtgtgtgtgtgtgtgtgtgtattacggaaagagtgttttttagttatttaatatgtatataaaatgtttttaaaagatgatcggtatgtttttaaggtatatgtttgttggattttagatgttgggaggtagaaagaaaagtttttattggttgatgaataaaattagatttttgtttcgtaaattataggtaatgatttatttaagtagatttgaagattttggaatcggtatttatttatttttttttttttttttttttttttatagtatttattttgtttttcgaaaagtaattgggtttttttttttttttttttatttgttttatgatattggatagttagaaatagtttttggagggatgggtcgtttatggttttgggtttttttggtttattggattattgtgtataaattagatgggggtttgagggttgtaagaggtttataaaagtagaatgtattttgtatgaaaagattattttttttaggtttagttgtgtagatagagtagaaattagtatttattgtttttttaggatttatgttgttatggttgagggattgtaggaatgtttttgtagattttttggaatttggttttttttaataaaataaggataatagtttttaaattttattatgttttattaataagaaggtgatttatacggtggtaggaaagagtttttttattagagaaagttgataggtataggagttgtttattttaaatataaagtttttttttttattatgatattttagttgttttgggtggaaaggaaaggttatagaagagggagtgtttgcgttttttaataggaatttatttatatttttgttagttaatatgtgttgtaaatattttttaaattttatatatttttgtgtagttttgagagaagtagggatgggaaaagggaaaagaaaatttattttttttaatgtgagggtaatagtttattttgagtgtgtttttataatttggaagtattgtgattttaaggtaattaattaatatgggtcgaagtgatggattttttagggagttggtttagtttttttttttgttaagttgttatttttgaggattagttattgaaaattgtaaggtatatggtattttatcgtaggattttttttttttaagtttttttaattggaggtgggattgatttaaatatattggtagtaagtgtgaggaaagggttgttagttatagttagttttaaaattgcgtgtaattaaggagagtaatataattgagaaaaaatattttgtttatttagtatagaatagtaaggtgggttgtgattttgtgtaggaattttttaagtgttgtaaatttttagtagtggaatattttttataagtgtgaagtaatgaaaaattattgtattttagaatagtttaaaattatagtatttttaaattgaagatattataaatttatttttttttgaatatgttttttagattataattttaagttgttttattttaattgtattagaggttagagttaggaggaagttattaatagattttttttgttttttaattaaatattaatttaagtttttttttttttatgaggtgttttttatttgttttatgttgtgtgttttaaagtatatattatttttattataaaatttattatttaatattttttattatttagtttttaaaaattagtttttatttttttatatgtaaagattagaatttttttttggtggggggtgggatggagttttgttttgttttttaggttggagtgtagtggtataattttagtttattgtaatttttgttttttagatttaagcgatttttttgttttagttttttgagtagttgggattttaggcgtgtgttattatatttaattaatttttgtattttttagtagagttggggtttcgttatgttggttaggttggttttaaatttattattttaggtgatttattttttttggttttttaaattgttgagattataggcgtgagttattgtgtttaggtaaggattagatttgaagtgtttaaagttttgggtttgggaagagagagtttttatgtttaaatttttaaatttttttgtgtataagttaattatggtatagaaggacgggattatttattatttttttattagttttattattttatttagttattttttagtttttggtgggtaaatgtggtgagtgatttataaatattgtatttttttttaaagaattgaagtaatatttttatggaattgattttagtgggtaggggtaggtatattggttaagggtaaatattttttttttttttttttatttttttgttagtgattgatttaggaattggtatgtgatttaaatttgacgaggtttgttgaaggttttcgggaaaagttttttgttgtttttaaggaagagttatgtgaaattaggttttttttattttttttggatattaataagaatgtcgataagtgttgtttggtgttattggttattggggagttaagtttagtgtgaaattagtgttggaggaggaagaataaaagtatagaaagaattcgtatgttaggttatatttttgagttgttaaattttttaatttttaagggaattttatttttagatttttttggttatgtgtttattatttaagttaagttgttgttttttattttttagaatcgtagatattataacggtttttttttttgtgtttggatggtttttttatttatgttttgattaaatttttttttatttttttagaataagagaagtaaggataggttataggataaatatattgtaaaggttttttatttatattattaagatgttttttagaaaatttgtattatttattgttttgtttatggtatgaggtagtttttttttttatttttttgtttgtagttattttagttttatatatttttaattgtaggttggtaagggtgagcgttattttcgattttattgtgtttttgtattttttttttgggtaattttgagatgtagtttagtaggtttataaagaaaagaataattaggatggatggattttagtgaaggggtaggggtattgatttgttaggaaattaagggtatggaggaaagaagatgggaaaaggagatggtgaggttttatattgggtcgaaagatggaaatggggaagattagtaaggtaggaaggtgaggatatggagaataggtttttaatatgtaataatgataaatttttaaaagtcgtttttggtaaaagttttttttatattttggacgataggtgtaggttattgtagtgttgttgatggggaggattgtatttgggagtagtttttttggttttattaatgtttattttttattattttagtaaaaaatgttattttatggggtattttaaatatggtttggtttgggttttagcgtggaagtttttttaagtgtttgttat

SEQ ID NO: 178 - DNA, 7833 bp, Artificial Sequence
  chemically treated genomic DNA (Homo sapiens)
gtttttggtgagatatgtgttttataagttttaatggagaaaaatgtaagtattttattttttgaaatttggttatttgagtaatgagaaaatagttattttttttaggatagtggtttttaattatggttatgtgtttttttaggaaaattttaaaaatatatatatattaatgtttttgtgttatttttagggattttaagtttttgaatacgaattttgtattagtattttttaattatttaggtgattgtgatgtgaaattatgattgagttttattgttttaagatgaaataaattttttttagtattgaaattataaatttaaattattaaaattaattaagggtatgggaattaataaggtatagggaagtttttatattataaaattatttttttaaattatagtttattgtttatatgttatttgttattgtagaaaagggtgaaaaaatagtaaatttaattatttttagtttgaaaaattatttagaaatgaagatgacgattttgaaatattgttaatattatttgatttataaataatgttttaatatatttattatatattgatagatatttttttatatgaatattatatattaaaattaaggtaataatgtatttagaatattttatttatatttatgtattttaagtaggttagaaattaagatatgagttattaagtatgagatgttaaggtgtggggttagaaattatattgtattttattattaataattaatatatattttaatattatatatatttaattttaatttgtatatttttaattatttttaattatgtgtataaatataagtatatatatttttatgtatttatttatttatatttttatttatttatttatataggggatttttttaaatttattattattaaattatatatttttattttaatttttagaataagtttaggaggtaggtattgttattatttatattttataaatgaggaaattgtttatagttataaagttattgtgttagatatattagaagtttaatatatatttggtgaatatatgtataaaaatagagagatagatatgtataatagtttatttttatattgagtaaaagtttttaatttgttttagaaatttttttgtgaaaattgagtaaaaatcgaggtatttttttatttgttatataggtataggtggtattttatttttttaataaggatgaatattgaaatgtggattttaaggtttaattttagattttttgaatttttgatagtgggatttggaatttgtttattgttttaaagttttttaaggaatttatatgattaattaggtttagaaattattggattttattgtcgaagtttgagaattaaagtttgggttttattgcggttttatagaaagggtaaatgaagtattatggatagaattgatacgtttttagttagtttttttttttagaagttaataggtagtaatatagtagaaattagtgatttatgttttgtgttttgaagttaggtagaattttatagagttttagtagtgttattgacgagatttgttttttggggtaagttgtttgatgtttttaaagttatattttttttatataaaatgagataatattttttgttttataggggtgttttaaagattaaataaaaataatatgttttattttatatggtataatgtttgatatttaagaagtaaaggatatattttatttttattgaagtaattagaaagtatgaaattatgaaggagataagagttttgattggtagtgtattttatttttttaggtttatttatttattttaaattatttttgttggagaataatttttaagttttttatttaagttgtgagtaattttatattttataatgatgttttttttatgagaaaaaaaaatgtttttaagttttttggagaaaatatatttgtattatttttattgaaaaatttaataattggattttgtttttttgtattaattttagagtgtatatgttataaataaagtgttttagtttaagaagattgaaagtaaatatggtatagtattttaaaataagaattttgtaaatatatggtatgattgtgttatattattagtaattatatgatacgtaatgtaaagtatagtttatagatttaaatttaattttaataagtaaattgattttgttttgttggggaaaagttaaagtattaatttaattgttaatgtagttttgtttatttttttggtatttagtgataagtttaaataatgtatatatttttatttatatatttagtaatataattttttgtttaatgagtgatgtttttttgttatttggtggtgtttgttagttttagaatttgttttttggtggtattataatattaagtatagagtaagtgtaataaaattgtagtatttttattgaaaaggttttgttttaaattgtttaataatttaaaggatttttgtggaagtaatcgtatttgttaattagttataattagtaattaatttttttggagttttaatttatttttggtaaaacgttttaggaagagtatatattattagaaagtatgttaaaaatttatttagtagaaaatttaaaaatagtttttttttgttaagaggttttttaaaattttatttatatagttaaattttgaaattttagtaggttttgttttattattataattattgtataaatatttttaaggattttgtttttagttttaagtatgatttatttttataagtttgattagttattatattagttttgttatggaaaatgatatgtttttattttttgttgtagagttgttaaattttgatttatatttatgttgttttttttgttgaaagtttgtagcgaaagaaatttttaattttttgttttgtaatattagttggtagttttatttaatgggtattttgtttttttaaagaatttagttgttttgtttagaagtcgattttttgatgtttttaacgtttggtttaattgatttgttttaatggagttttcgtcggtgaggagcgagatgttatcgattagaatgttgggatttgttgtttaattgttaggagtgagagatattgagatttagaaatttttggaggtgggaggggagagggatagtttcggacggaggcggagatgtaagataaagggatggattttatataggaaaaaaaaaaagatttcgttgaggtattgaggtgttgtacgattatattttttaaaggagaagttaaaaagtaaggaagtgggaggaggttggaggttaaagtatttaaaaggattattcgggtataatttgtttttttgttggtgtttgtaaaggatagatagtttcgtttttaaagtatatgaatgttttttttaagtgattgggaatggatattaattgtttgttaaatgttattaaatgtttttttaaatttaggggatatagaaagaggggtataaaaggagaatttaaatagaaaaagggaggattcggaggtttttgaaagcggggggagaagaaggaggagggataatagagaggaatagagaaggagagcggagagaagataaataaaaataaaaataggaattattgaataattatatattaaaaagaaagtttttttttatggggtatttaaaatattgagattgtaatagtgatttcggttatggaagaaagatgtttttttttatttttgttttcgaaagtttttggtttcgttattggcgattaaaattttattaggttaaagagtgtgtttaattgtttgaagaatgtagtagacggaaggcgggtttcgttatgtcgtttgtttttttcgttggagagaatgaaagaaacgcgtagagttagagatttttgtcgagttagattttttttcgtcgttttaggttatcggttattcggtaaagattcgagtaaggaacgtagggttattgtttgggttaataaatggagttcgttttttttttttcggacgtcgttgttcggtcgatgttttcggtaatttattcgcggcgtatgtagaggagttttttttttttttttagattatttgtttcgattaatttgattttttaaatatatttgatcgtattttttaggtggatatattaataggttacgggttggagaggagcgggtgatgaggagagggatttaaatttgcgaacgtttgggttgggtcggagttgcggggggtttgggaggagagaggggagaagagagaaggaaggagagcgtttgtcgggatggttgagttgtttcggcgagtagttttggggttgtacgtttttgtgggagatgttgttgttgtttttaggtcggtaagagcggttttaatattatcgttttttatttttttttttgtaaatttttagagaaacgtttttggttttttcgtcgcgatatttttagtttgtatttttttatagtttaggcggcgcgttttcgtacgttggagcgtcggtcgttagtaggacgttttttttcgcgtcgattcgtttttttttgttttgttgttgttgtttttttgatattttcgtttttattatttttagttcggagagacgttatttagtcgcggttcgtattcgcggttcggggttacgcgcggaagaggggcgttagttcggatttcgttttcggtagggggcgttttggagcggagagtgaggcgaatggtatatgagtgtgcgggtagtttattttgaagttcgagttttttatttgagttatgtttcgtttagttttattcgggttagcgtttggcgagcgagtttatttgtggttttcgcggtcgttttttttttgtatttttgtatttattcgtcgatttttttttttcgggatttgtattttgttttattaattagagttcgattgtttttttttacgtgatttcgggcgggttgaggatttgttgttttttaaacgttagagggatgcgggcggtagagttcgagaggcggttgtcgggttgcggggcgttttgattttttttttattttgttttttcgggttttattcgtttgtttttggattttcgtttttttttgtttttcggttttttagagttttttttttatggtagtagtttttcgcgttttcggcgtagttttttagcggacgattttttcgtttcggggttgagtttagtttttggatgttgttgaaattttcgagattatgcgcgggtttggttgttgttttttcgtcgggtgttattgttatcgtcgtcgtttttgttgtcgtcgttcgcgggatgtttagtagttcgttgttcggttttcgcgattttgtgtttttcggaagtcgtttgttgttgtagagttgtacgaattagttatggtgttgtgggagttttcgcggtagtgtagtagttggatattttgcgagggtttttgttggttgttgttgttgttcgttatgttatttatcgtagttcgttcggtgaagttcgttgttttttttatttttttaagtgattgttaaacgtttatcggttggaattgttttggtaagtttagaattttcgttttcgattttttaatttcgtagaagaatacgcgtatttagtatagattagtttattttagcgcgtttttttagttttttattttttattgttttagatttttaatattatttatttttatttagagaaataaggggaattgttgtaggttcgggggtgaggggtggttttgggatgggtagaaagtgtaggtgtagtaggaaatttttgtatgtttgcgtttatattggagttgcgaggattttgagaaatattaaacgggatggttttttgggtttattgttttgaaagagtattaattttaggggaaatattgaaatagaagttttgttattattaaagaaaaaagttttattaggatgaggaagaaataattttatgagaaagaatgagcgagaaagtaataaattaaatggtgattgtaggggaatcgttgatttttggtaaaggtgttatgaggtcgtattggtttttcgttgaagattaggttatatagattttagaggagttgggttttaatagaatttttttttttttttttttttttttttttttttttttttttttttttttatttatttattttttttttttttttattttttttttttttaggcggtaaaagatattggttttgtagtttagatatgtttttttttttgtttttttaagttttaaggtagtataggggagttgagaaaaagaatattttgcgggttttttaggtcggagtgggtatgattgaggttggttaggttttatgtaggcgagtcgagggcggaatcgattttagtgggcgttgatttttttatttttggataggtttttgtggagtgggttaggtattttttttgttcgttcgggtttttttagattttgacggcgaacgtttggtaggtttcgttttgttgaagttttttaattaaatagggttagaggatgggagttgttgtatttttagttggtatagtattcggtttgatagtttgtagtatagggtgtatgtaattttttattttttgtgaatataattttgttgtagttaaatttggttttgaataaagtgttttttaaagatgtatataagttgaagtgtatgtaattttagagaggagggaatgattaattgtaatttagggtgaaagtttgtatagtttttagttattattgatgtaaatgttaaaaggaaaattattatgtattattttaatttattttttataaagataagttgagatatgtaattttattagatttgggttaatagattgtttttttttttggtagtttttaaatttggtattttaataaaatttaatatgtttttataattttttgatttatgcgtatatgtgtgttgtttttgaaagaataagttttattttgttattgtttaattattttttagatgttttattatggtaataattatgagtttgtaaaaataatttttggaaatgttgatggttttgtagtttaatatagattggtttgttttatttttagtttttgtattgttttaggaaataattaatttaaatgtgaagttgatatttgtaattaagaaattatatatttattagatattttaaaggggattgtataaattaaagagaataaattggttttgtagataggttgttaagaatttggtatttcgtttttatttttgttaatttagaggtgattaatttttatttgagttaaatagattattatagaaaatattgtgtttgtttatttttattattgaggttttgttttttttttgtttggatatattttaaataaggggttgttttagtcgttgaagtaaaagaataattaaagatggggaaatggtaaaagggtatttagagattattattagtttttttttaaaatgtggagttttgtggttataaatattgtttatttaatgagtaaaaaataaaaataaaaaaaaaataggaagtaaatgttaagtttttatttattattgttagtattaacgtaagttttaaaaaatagtattattagaaaaggatattaaaggagaattgattagaaaagaattgtggaaaatggaaacgaatattgattatttaattagattttgaggttattagtagatagtgattttgtagtatagttatagttgttggatttaaaatttaggataagtattttaaagttttaaagtagtgtttttttttgttaaaaatttgtaagatgttttaatgattggagtgttttttttgaatttgagg

SEQ ID NO: 179 - DNA, 7833 bp, Artificial Sequence
  chemically treated genomic DNA (Homo sapiens)
ttttaaatttaaagagaatattttagttattaaaatattttatagatttttaataaaaaaaagtattattttgaagttttaaaatatttgttttaaattttaaatttaataattatagttgtattgtaaggttattgtttattgataattttaaaatttagttaagtgattaatattcgtttttattttttataatttttttttagttaatttttttttagtatttttttttgatagtgttattttttaaagtttgcgttaatattgatagtggtgaatgaaagtttaatatttgttttttgttttttttttatttttattttttgtttattaggtggataatatttatgattataaaattttatattttggaaaagagttagtgatgatttttgaatatttttttattatttttttatttttaattgtttttttgttttaacgattgaaataattttttatttgaaatgtatttagataaagaggaaataaagttttaataataaagataaataggtatagtgttttttgtgatggtttgtttggtttaaatgaagattgattatttttaagttaataggggtggaagcggggtgttaagtttttgataatttatttgtaaaattagtttattttttttagtttatgtagttttttttaaaatatttggtaaatatgtaattttttgattgtaaatgttaattttatatttaagttagttattttttaaaataatgtaagggttaggaatgaagtaaattagtttgtgttggattataaagttattaatatttttaaaaattgtttttgtaggtttataattattattataataaagtatttaaaaagtgattaggtaatagtaaagtgaaatttatttttttaaaaataatatatatgtacgtatgaattaagaagttatagaaatatgttgagttttattaaaatgttaaatttagaaattgttaaaaaagagaataatttattgatttaaatttaatagggttgtatattttaatttgtttttgtaaaggataaattagaatgatgtataataattttttttttggtatttatattagtaataattaggaattatataggtttttattttgagttatagttggttatttttttttttttaaagttatatatattttagtttatatatatttttgaaagatattttatttagagttagatttaattatagtaaaattatatttatagaagatgaaaaattatatatattttatattataggttgttaaatcgaatgttatgttagttaggagtgtagtaatttttattttttggttttatttaattaggaagttttagtagagcgaagtttgttaagcgttcgtcgttagaatttgaaggaattcgagcgagtaagaagagtgtttgatttattttatagaagtttgtttagaaatggaggagttagcgtttattgaagtcggtttcgttttcggttcgtttatatggagtttgattagttttagttatgtttatttcggtttgggagattcgtaaagtgtttttttttttaatttttttgtattattttgaagtttagggaagtaaagagaggggtatatttggattgtaaaattaatgttttttgtcgtttaggagagaagggaatgagagagagagagagatagatagatagagagagagagagagagagagagagagagagagagagagagagagaaattttattgaaatttagtttttttagaatttgtgtgatttggtttttaacgggagattagtgcgattttatggtatttttgttaggaattagcgatttttttgtagttattatttgatttattgttttttcgtttatttttttttataaagttattttttttttattttagtaagatttttttttttaatgatgataaagtttttgttttagtgttttttttaggattggtgtttttttaaaatagtgaatttagaaaattatttcgtttaatattttttaaaattttcgtagttttaatgtaagcgtaagtatgtaaaggttttttgttatatttgtattttttgtttattttagaattattttttattttcgggtttgtaatagttttttttgtttttttggatagaggtgggtggtattaggggtttagggtagtaggaggtgaggggttgaggaggcgcgttagggtaggttggtttgtgttggatacgcgtgtttttttgcggagttaaagggtcggggacgggggttttggatttattagagtaattttagtcggtgggcgtttggtagttatttaaggaggtagggaaagtagcgagttttatcgggcgggttacgatgagtagtatgacgggtagtagtagtagttagtaaaagttttcgtaaagtgtttagttgttgtattgtcgcggggatttttatagtattatgattagttcgtgtaattttgtagtagtaaacggttttcgaggaatataggatcgcgggggtcgggtagcgggttattgagtatttcgcggacggcggtagtagaggcggcggcggtggtagtggtattcggcggggaagtagtagttaaattcgcgtatgatttcgagagttttagtaatatttagggattgggtttagtttcggagcgagagggtcgttcgttgagaagttgcgtcggagacgcgggaagttgttgttataaggagggagttttgggaagtcggaggataggaggagacgggagtttaggggtagacgagtggagttcgaggaggtagggtggagggagagttaaggcgtttcgtagttcggtagtcgtttttcgagttttgtcgttcgtatttttttggcgtttgggaagtagtaggtttttagttcgttcggggttacgtgggaagaggtagtcgggttttgattggtggagtaggatgtaggtttcgggagggaggggtcgacgagtaggtgtaaggatgtaaggaggaggcggtcgcggaagttatagatgggttcgttcgttaggcgttggttcgagtggggttaggcggggtatggtttaaatgagaagttcgggttttagggtgggttattcgtatatttatatattattcgttttatttttcgttttaggacgttttttatcgaaggcggggttcggattagcgtttttttttcgcgcgtgatttcgggtcgcgagtgcgggtcgcggttgggtggcgttttttcgagttggagatggtgggggcggaggtgttagaggagtagtagtagtagggtagagaggggcgagtcggcgcgggagagggcgttttgttggcgatcggcgttttagcgtgcgggagcgcgtcgtttaggttgtagggggatgtaggttgggaatgtcgcggcggagaggttagggacgtttttttagggatttataggaaagagggtgagaggcgatggtgttagaatcgtttttgtcgatttggaagtaatagtagtattttttataagagcgtgtaattttaaggttgttcgtcgaggtagtttagttatttcggtaggcgttttttttttttttttttttttttttttttttttttaggtttttcgtagtttcgatttagtttaagcgttcgtaggtttgaatttttttttttattattcgtttttttttagttcgtagtttattagtgtgtttatttgggaggtgcggttagatgtgtttggaaggttagattggtcgggataagtggtttgagagaaagagaaaggtttttttgtatacgtcgcgggtgggttgtcgggagtatcggtcgggtagcggcgttcgggaaggggagagcgggttttatttgttggtttaggtagtgattttgcgttttttattcgggtttttgtcggatggtcggtgatttggggcgacgagagaaggtttaattcggtaggagtttttggttttgcgcgttttttttattttttttagcgggaagggtaaacggtatagcgggattcgtttttcgtttgttgtattttttaggtagttagatatattttttagtttaatggaattttagtcgttagtaacgggattaagagttttcggggataagggtggagaggaatattttttttttatgatcggggttattattgtagttttagtgttttggatgttttatagggaagagttttttttttggtgtgtgattatttagtgatttttgtttttgtttttgtttatttttttttcgttttttttttttatttttttttgttattttttttttttttttttttttcgtttttaaaagttttcggattttttttttttttatttaaattttttttttgtgtttttttttttgtgttttttgaatttaggagagtatttgataatatttaataggtaattagtgtttatttttaattatttaaaagaggtatttatatattttgaaaacgggattatttattttttgtagatattagtagaaaaataaattgtattcgagtaatttttttaagtattttaatttttaatttttttttatttttttgttttttaattttttttttgagagatgtgatcgtgtagtattttagtgttttaacgaaattttttttttttttttgtgtgaaatttatttttttattttatattttcgttttcgttcgagattgtttttttttttttttatttttaaagatttttgaattttagtgttttttatttttggtaattaagtagtagattttagtattttagtcggtggtatttcgttttttatcgacgaagattttattaaaatagattaattagattagacgttggaggtattagaaaatcggtttttagatagagtagttaaattttttaaggaaatagaatatttattagatagagttgttaattaatattgtaaaataaggaattagaaatttttttcgttataggtttttagtagagaaggtaatataaatatagattaagatttaataattttatagtagagaatgagaatatgttattttttatagtaaggttggtgtggtaattaattaggtttatgaaaataagttatgtttgaaattaaaggtaaagtttttaaaagtgtttatgtagtaattatgataatgaaataggatttgttaggattttagagtttggttatgtaagtagaattttagagaattttttagtagaggaaaattgtttttgaattttttgttaagtaaatttttggtatattttttaataatatatgttttttttaagacgttttgttaaaagtaagttaaaattttaaaggagttaattattggttgtaattggttaataaatgcggttgtttttatagaggttttttaaattattaaatagtttgaagtaaagtttttttaatgggaatgttgtaattttgttgtatttattttgtatttagtgttatagtgttattaagaaataaattttgaaattggtaagtattattaagtggtagaagaatattatttattgagtagagaattgtattattgaatatgtaaataaaaatatatatattatttagatttgttattaggtattaaagaagtagataagattgtattagtaattggattagtgttttaatttttttttagtaaggtaaaattagtttatttattagaattaaatttaagtttatgaattgtattttgtattgcgtattatatgattgttagtaatatgatataattatattatgtatttgtaaaatttttattttaaaatattatattatatttatttttaatttttttgagttagaatattttatttgtggtatatatattttagaattgatgtagaggagtagagtttagttgttagattttttagtagaaatagtgtagatatattttttttagaaaatttaagaatattttttttttttatggaaagaatattattataaagtgtgagattatttatagtttaagtagggggtttgggagttattttttaataagaatagtttaagataaataaatgaatttgggaaaataagatatattgttaattagaatttttattttttttatgattttatattttttgattgttttaataaaggtaagatgtattttttgttttttaggtgttaggtattgtgttatgtaggatagaatatgttatttttatttaatttttaaaatatttttatgagataaagaatattattttattttatataaaaggaatatggttttgaaagtattaggtaatttgttttaagaaataaatttcgttagtgatattgttgggattttgtgaaattttgtttgattttagagtataagatataagttattaatttttgttgtattgttgtttgttagtttttgagaggggaaattaattgggaacgtattagttttgtttatgatattttatttgttttttttgtggagtcgtagtaaggtttaaattttaatttttaaatttcggtaataagatttagtgatttttgaatttggttgattatatgaattttttgagaaattttgaaataatagataaattttaagttttattattagggatttagaaaatttggagttgggttttgggatttatattttaatatttatttttgttggagaagtaaggtattatttatatttatatgataaatgaaaggatatttcgatttttgtttagtttttatagagaggtttttgagataggttaaaagtttttatttagtgtaaagatgagttgttgtatatgtttgtttttttgtttttatgtatatgtttattaaatatgtattaagtttttaatatgtttgatatagtaattttgtgattgtagataatttttttatttgtaaaatgtgagtaataataatatttgttttttgggtttgttttaaagattaaaataaaaatgtatggtttaatggtagtggatttggggggattttttatataaataagtgaatggaggtatgaataaataaatatataaagatgtgtgtatttatatttatatatataattaaaaatagttaaagatgtataaattaaagttaaatgtatgtgatattgaagtatatgttgattattgataatgaagtatagtataatttttaattttatattttaatattttatatttaataatttatattttaatttttagtttatttaagatatatagatatagatagaatgttttaaatgtattattgttttagttttaatgtataatatttatatgaaaaagtatttattagtgtgtagtaaatgtattagaatattatttataggttaaatgatattgataatgttttagagtcgttatttttatttttggataattttttaaattgagagtaattaaatttgttatttttttatttttttttataatggtaaataatatataaataatgagttgtgatttaaagaaataattttataatgtaaaagtttttttatgttttattgatttttatgtttttaattaattttggtagtttaagtttgtgattttagtgttgaggaaagtttattttattttagagtagtggggtttagttatgattttatattataattatttggataattaaagaatattgatgtagagttcgtatttaaagatttggaatttttagaagtgatatagaagtattggtatatatatatttttaaagtttttttggagaaatatatagttatgattgagaattattgttttggggaaagtgattatttttttattatttaaatagttaagttttaggaggtaaaatatttatatttttttttattaaaatttgtaaaatatatattttattaaagat

SEQ ID NO: 180 - DNA, 7258 bp, Artificial Sequence
  chemically treated genomic DNA (Homo sapiens)
tttaataggaagtattaatagtttatgttttaggattttgtttttataattttgtaatattatattacgatatttaatttaatttttattaagttttgttaaaaacggattttaaattaagttgtaaatttttagtaatttggttttgtttttttttttttgatagtattattaaataaatttttttattgtcgaaagtaataagttcggttttgttttatttattggttgtgttggtgatatttggggattgttattgaatagacgtatagagggagtttttataggtaggggtttttttgtttgtgttttttgggagagtatgtttcgtatatttgtcgcgtgatgaagattttatagttttatttagcgattagatttatagttttatttagttgcggtaagggggtttgaggtagttttaggtaagttggggtttagcgggagaagttgtagaagaattgattagaggatttaggaggttttagagttgggttgaggtagagagttttttgtgcgtttttttttttttttgtaattcggggattttttgtattggggtaggtttcggtaggtgtatgggaggaagtacggagaatttataagtttttcgattttttagtttagacgttgttgggtttttttcgttggagatcgcgttttttttaaatttttgtgagcgttgcggaagtacgcggggttcgggtcgttgagcgttgtaagataggggagggagtcgggcgggagagggaggggcggcgtcggggcgggttttgatatagagtaggcgtcgcgggtcgtagtatagtcggagatcgtagttcggagttcgggttagggtttatttgttttcgtagcgtcggttcgcgtttttttgtcgtagttatcggtgagtgtcgcggttttgagattttcgggtcggatgcgcggcggttttagttttcgagcgtttgtttgtttcgttttgggttgttcgggttttttgggtttttcggcggttgtacggagttaaggcgtttcgtttcgggcgtttttcgcgggtgtcgatttaggttgttcggagttcggagtttatagaggagagagatagttggggagtttggttatcgcgggtattttttttgcgttgtagtcgttcgtttggtttgttttttcgttttttcgttttttgttttgattttttttttttttgtagagtcgtcgtttagcgtttcgatttcgttattatgagagttttgttggcgcgtttgtttttttgcgttttggtcgtgagcgattttaaagtgagtgcgtttttgttttgattgatgttgtttaaggatttttgattagtattaggggagaggaggggttgtttagggagttggggttttcggattttatttatagtagggttagattttttttaggaaatgggatagggtggtagcggaggtttgagaattacgggggttggtattggttggtaagggaggaagagggttatcgggattgttttagtttgcgggtatttggtagatgaagtttaatttattttttttggttggaaattatggttttttatttgagaattagatacgaatagggtgaggcgagagggagagggaagagtgggttttgggattggggttagtttatttttattttggatttttggagtatgggatttttgatgaagttttttttcgaattttttttagggtagtaatgaattttattaagttttatgtgagtatttatttttataatagttggttgtatagataagttgggaaggttttaggggatatttttttttttgttttttgttgtagcgtgcgttattttttattatttttattttttttcgtttattttatttttgttttttttagcgaattgtgattgtttaaatggaggaatatgtgtgtttaataagtatttttttaatatttattggtgtaattgtttaaagaaattcggagggtagtattgtgaaataggtatggggatttttattgtaattgggagagaaatttggggatagggagggatgggtgggaggtaagagtaggtaggagttaggagttggaggtagggtgggtgatatttttatttttatgtgataagtataaatatatatatacgtttacgaaatagtggttatataaatgtgaggtggggttggaaggagattttgtttagttttttggtaggtttgaaacgatatttttaaaatgttcgttggtagtcgggtatggtggtttacgtttgtaattttagtattttgagaggttaagtttgagtggattatttaggttaggagtttaagattagtttggataatatggtgtaattttgtttttattaaaaatgtaaaaattagtttggtatggtggtggatgtttgtagttttagttatttgggaggttgaggtaggagaattgtttgaatatgggaggttagattttagtgagttgagattatattattgtattttaattgggcgatagagtaagattttattttaaaaaaaaaaaaaaataaaagttagttggaatgttttttttttttttatatttttttatttttttgtttttttgtagataagttaaaaatttgttatgaggggaatggttatttttatcgaggaaaggttagtattgatattatgggtcggttttgtttgttttggaattttgttattgttttttagtaaacgtattatgtttatagatttgatgttttttagttgggtttggggaaatataattattgtaggtgaggtgggggtaataaggattaaaagttttttttatagttttttagaaattttgttattattttttttttttagagggttggttatagtataagagaagtgcggtttttggttgagttttttttgaggggaggaggtagggaaggttttttgggttggaatgatattttttatttttttgtgttgtgttaggaatttagataatcggaggcgattttggtgttatgtgtaggtgggtttaaagtcgtttgtttaagagtgtatggtgtatgattgcgtagatggtgagtattattgatttgttgatgataggtgggtggaaggggataaatttatatgtttttttattttattataggaggattgaggaggtggggggtgttcgagagggatgtttttttttatttgtttttttaagatatttttttgtttgttttttaggaaaaaagttttttttttttttagaagaattaaaattttagtgtggttaaaagattttgaggtttcgttttaagattattgggggagaatttattattatcgagaattagttttggtttgcggttatttataggaggtatcgggggggttttgttatttacgtgtgtggaggtagttttatgagtttttgttgggtgattagcgttatatattgttttatgtacggttttgggtttttttttttcgatttttttgttttattttaagtatattttttttttttttttagtaaagtgtttcgttttattttttttttatttgtttttgtttatgcgtttatggttttggggataagtcgtgttttgaggtttttagggagggaaggaagaagtggtatgattttatgggattaagttgtttgatgggtatttttttttatagtgattatttaaagaaggaggattatatcgtttatttgggtcgtttaaggtttaattttaatacgtaaggggagatgaagtttgaggtggaaaattttattttatataaggattatagcgttgatacgtttgtttattataacgatattggtgagggggaacgttcgcgattattgtggttataatggtttggggagagtgggatttagggagagattggagttgagttgaagttgtcggtggggtaggggtggggcgagggattttgaagtttcgatatatatgataaaggatggtagggaagagttttatgaagtttgaggggtttggtgtttttttggagagattttgaatttttttaataagtagtttttttgcgagtggaaatagttttgtgggtatatggtttgggttgggaaggttttgtttatatgaattagaaaaagatatatttttttttgtgggatgtagtttttgtttgtgttaggatatagaatttggagaatggagttttgggatggattttagtttaattattttagggggattttttagagtgtagttgggagtttttgtagaaacgatttgtatagttgtatgtagtggttttggttatttaagttttttttaatatttggaataaagtttttggggtatggggtaggggaggtttttaggtgataagcgattagtagatttttttggatgattgatttagggataggtatagttattttttcggtatttggaggggatagatggggatcgtttaattagtagtgattttttttttttgattttttgtttttttttagttttgttgaagattcgttttaaggagggtaggtgtgcgtagttatttcggattatatagattatttgtttgttttcgatgtataacgatttttagtttggtataagttgtgagattattggttttggaaaagagaattttagtaagtgataattgcgattgatttagaaggttttgaggagtgttttgatttgaaaatgagtttagtgtgattaagggaagattgtagagttagaggtgggagtattgaggcggtggtagatgggtttagggatggatgaagagtgttgtttagggagcgatgggttgtaaaggtaaatagatggtaggggttataggtggaggtaaatggtttagatttgtatggagagagaataatgggtttttttttgggtgatgatattttatggtgttttttttttggcgagacgttttacgtggaggtagataaattttgatgtaaacgtttttttgttttttttatttagtcgattatttttattcggagtagttgaaaatgattgttgtgaagttgattttttatcgggagtgttagtagttttattattacggttttgaagttattattaaaatgttgtgtgttgttgatttatagtggaaaatagatttttgttaggtgagtgttttaagtatttttttttattttttttatatttttttagagtttttgggtttgttttagttagtttaagggtgtttttttttagttaaagttttaagtagttagaattaggagtttaggtttttgagggtttaaattagtttttatgtgtttgttagatattattaaaaaaattttagttttgcgttagttattttagattgggggtacgagattttagaaagaggaaatagtaaaagataatgtaatttagtgtttagggtgtgttgtgaattataaatgattaggtgtttaggagagggaggtgagtgttaatttgagggttagggaggggaggttttaaaggaaatgtgatttgataggtatttgaagaggtagagggaagaaaggaaggtgttttagttgaaagatataaaattgagaaggaggttggtatatttcgggtggggaggagaattagggtttgggagtgtggatggaatagtggtagatgatagggtttttaaagttaagtaggggattttttaatttcgatgtggtagaaatggggttgcgttaggtatagtggtttatgtttgtaattttagtattgggttaggtcgtagtcgatggattattgaggttagagttgagatcggtttggattaatatggtgaaattttgtgtttattaaaaaatgtaaaaaaaaaaattagttaggtgtggtggtgtttgtttgtaattttagttaattaggaggttgagatatggaatcgtttgagtataggaggtaagtttgacgtgagttgagattacgttattgtacgttagtttgggcgatagagcgagattttgttttttcgtcgaaaaaagaaagaaaatgggaagtcgttaaggattttgattgggaaatttttttttttttttggtatggttgggtgatgggattagaaattttttttttatttttttagggtttattttttgtatttttggcgttatagggagatttagggggatttttcgtttgttttttttaaggtcgtatgattttgattggaattgtgagttggggtcgtggatgtgttttgaaggataagttaggcgtttatacgagagttttatattttttattttggattcgtagttatattaaggaagagaatggtttggttttttgagggtttttagggaggaaacgggtattattcgtttttttgttggttgttatttttgtagtagagttatttttattagttgtaagaagagattgggaagataggttttgtatagatggatttgtttgtgttatttattagggtgaacgataatagttttatttttaggtataggtttgggtgttggttgtttagatttttttggttaggatggaggggtggttttgatttaatatgttattgattagtaatttgtttttttttggattgaagtttgtaggagttaaaaagggtagggtattttttgtgtatgggtgaagggagagttagttttttcgacggtgggtatttgtgaggtttatggttgagaaatgaataattttttaattaggaagtgtaatagttgaggttttttgagggagtttagttaatgtgggagtagcggtttggggagtagagatattaacgattttagggtagggttttgatattttatgaatgtattaggaaatatatatgtgtgtgtatgtttgtatatttgtgtgtgggttgtgagtgtaagtgtgagtaagagttggtgtttgattgttaagtttaaatatttttttaaattgtgtggattgtgatgttatatagagtggtttttttggagaggttataggttatttttggggttttttgggttttttacgtgatagtgtttgggaatgtatttattttgtagtatgatttgtgattagtattgttttagttttatttttatatagatgttttttttttggttagttattttttttttttagtttagtttatttaatttttattgggtggggtgaggattattttttatattgaatatttatattttattatttttatttatatttttgtaattttaaataaaagtgattaataaaatgtgatttttttgatgataaatttttttggtgtttgtatgggaaggagttggagtatataaaaaggagaaaataataaaggtgg

SEQ ID NO: 181 - DNA, 7258 bp, Artificial Sequence
  chemically treated genomic DNA (Homo sapiens)
ttatttttgttatttttttttttttatgtattttaatttttttttatataagtattagggagatttgttattagaaaaattatattttattgattatttttatttaaaattataaaaatataaataaaaatagtgaaatataaatatttagtgtaaggagtggtttttattttatttagtgaggattggatgaattaggttaaaaggaagggataattggttaagaaagggatatttatgtgaaagtgaaattgagatagtgttggttataggttatgttgtagaataagtatatttttaggtattgttacgtgggggatttaagaggttttaggagtgatttataatttttttagaaagattattttgtgtggtattatagtttatatagtttaaggaaatatttagatttaataattagatattagtttttatttatatttatatttatagtttatatataagtgtgtaaatatatatatatatatatattttttgatatatttatggaatattagagttttgttttgaagtcgttagtgtttttgttttttaaatcgttgtttttatattggttaagtttttttaagagattttagttgttatattttttaattgggaaattatttattttttaattatgggttttataaatgtttatcgtcgggggagttggttttttttttatttatgtataggagatgttttgttttttttaatttttgtaggttttagtttagaaaaagataagttgttggttagtaatatgttgagttaggattatttttttattttggttagaggggtttgggtagttagtatttaggtttatgtttgagggtaaagttattgtcgtttattttggtgggtggtataggtaaatttatttgtgtagagtttatttttttagtttttttttatagttgatggagatgattttattgtaaaaatgataattagtaagaaagcgggtggtgttcgttttttttttggggatttttagagggttaggttatttttttttttggtgtgattgcggatttagggtaagaagtgtgagattttcgtgtagacgtttggtttgttttttagggtatatttacggttttagtttataattttagttaaagttatgcggttttggagggaatagacgaggggtttttttgagtttttttgtgacgttaaagatataaaagatgagttttagagaagtgaggaggggatttttgattttattatttaattatattagagagagggaagagttttttagttaaagtttttagcgattttttatttttttttttttttcggcgggaggatagaatttcgttttgtcgtttaggttggcgtgtaatgacgtgattttagtttacgttaaatttgttttttgtgtttaagcgattttatgttttagttttttgattagttgggattataggtaggtattattatatttggttaatttttttttttgtattttttagtagatatagggttttattatgttggtttaggtcggttttaattttggttttaatgatttatcgattacggtttagtttaatgttgggattataggtatgagttattgtgtttgacgtagttttatttttattatatcgaagttggaaaattttttgtttggttttaaaagttttgttatttgttattattttatttatatttttagattttagtttttttttttattcggaatatgttagttttttttttagttttgtattttttaattgaaatattttttttttttttttttgtttttttaaatgtttattaagttatattttttttaaagttttttttttttgatttttaggttggtatttattttttttttttgaatatttgattatttatagtttataatatattttgggtattgagttatattgttttttattgttttttttttttaggatttcgtgtttttagtttgaagtgattagcgtagagttgggatttttttggtaatgtttggtaaatatataaggattggtttaaatttttaaagatttgagtttttgattttggttatttagggttttggttagagagagatatttttaagttggttggaataagtttaggagttttggggagatatggaagaggtggagagagatgtttggaatatttatttggtaggaatttgttttttattgtgggttagtagtatatagtattttggtggtgattttagagtcgtagtagtggggttgttgatattttcggtgggaaattagttttataatagttatttttagttgtttcggatagagatagtcggttaggtggagaaaatagggaggcgtttgtattaagatttatttgtttttacgtgggacgtttcgttagagaggggatattataaagtattattatttagggagaggtttattattttttttttatgtaaatttgagttatttatttttatttatagtttttattatttatttatttttgtagtttatcgttttttaaataatattttttatttatttttggatttatttgttatcgttttagtgtttttatttttaattttgtagtttttttttgattatattgggtttatttttaggttaaaatattttttaggattttttaagttagtcgtaattgttatttattagaatttttttttttaaagttagtgattttatagtttgtgttaaattggggatcgttatatatcgagggtaggtagatggtttgtatagttcgggatggttgcgtatatttgttttttttggaacggatttttagtaaggttgggggaggatagagggttagaggagaaagattattattggttaggcggtttttatttgttttttttaagtgtcgaggaagtagttatgtttatttttaggttagttatttagggaggtttgttggtcgtttattatttggaaattttttttgttttatgttttaagggttttgttttaggtgttgaaaaaggtttggatggttagagttattgtatatagttgtataggtcgtttttgtaaaaatttttagttgtattttagaggatttttttgaggtagttaggttggaatttattttaaggttttattttttaagttttatattttagtatagatagaggttgtattttataaaggaaggtgtgtttttttttaatttatataaatagggtttttttagtttaagttatatatttatagggttgtttttattcgtaagagggttatttgttggggaaatttagggtttttttagaggagtattaggttttttagattttatggaatttttttttgttattttttgttatgtatatcgaggttttaaggtttttcgttttatttttgttttatcggtagttttaatttagttttagtttttttttgggttttattttttttaagttattatggttatagtagtcgcgggcgtttttttttattaatgtcgttgtggtgagtaagcgtgttagcgttgtagtttttgtgtaggatgaggttttttattttaaattttatttttttttgcgtgttggagttaagttttgagcgatttaggtagacgatgtagttttttttttttgggtaattattgtggaagaagatatttattaaatagtttagttttatgaaattatgttattttttttttttttttttagaggttttaaagtacgatttgtttttaaggttatgggcgtatggataggggtagatgagggagaaatgaggcggaatattttgttgggaaggagaaagggatgtgtttggggtggggtagaagagtcgaagaggagaaatttagggtcgtatatgaagtagtgtgtggcgttgattatttagtaagggtttatgaggttgtttttatatacgtaggtgatagagttttttcggtgttttttgtagatggtcgtaaattagggttggttttcgatggtggtgaatttttttttaataattttaaagcggggttttagagttttttggttatattgaaattttaatttttttggaggagaggagggttttttttttggaggataaatagagggatgttttagggaggtaggtaggagaaagtatttttttcgggtattttttatttttttagtttttttgtgatggaataaggggatatgtaagtttgtttttttttatttatttgttattagtaggttagtgatgtttattatttgcgtagttatgtattatgtatttttggataagcggttttaggtttatttgtatatagtattagggtcgttttcggttgtttgggtttttggtataatatagaaagataggggatgttattttaatttagagggttttttttgttttttttttttagggaagatttaattagaggtcgtattttttttgtgttatggttagttttttgggagaaggggatggtaataaggtttttgggaagttgtagggagggtttttggtttttgttgtttttattttatttgtagtaattatgtttttttaggtttagttgaagagtattagatttgtgggtatggtacgtttgttgaaggatagtggtagagttttagggtaggtagggtcggtttatggtgttagtgttggttttttttcggtaaaagtgattattttttttatagtaggtttttgatttatttataaggggataggaggatgagagaatatgagaaagagaagaatattttaattaatttttatttttttttttttttgagatggagttttgttttgtcgtttagttggagtgtagtggtgtgattttagtttattgagatttggttttttatgtttaagtaatttttttgttttagttttttaagtagttgggattataggtatttattattatgttaggttgatttttgtatttttagtagaggtagggttatattatgttgtttaggttggttttgaatttttgatttaaatgatttatttaaatttgattttttaaaatgttgggattataagcgtgagttattatgttcggttgttaacggatattttaaagatgtcgttttagatttgttagaagattggatagggtttttttttaattttattttatatttgtgtggttattgtttcgtgagcgtgtgtgtgtgtttatgtttgttatatagggatgaagatgttatttattttatttttagtttttaatttttgtttgtttttgttttttatttatttttttttgtttttaaattttttttttagttgtagtggagatttttatatttattttatagtgttgtttttcgaatttttttgggtagttgtattagtgaatgttggagaagtatttgttggatatatatgtttttttatttagatagttatagttcgttggagagaataaaggtggggtaagcgagggggagtggaagtggtaaggggtggcgtacgttgtagtagagggtagggaggggagtgttttttgaagtttttttaatttgtttgtgtagttaattgttgtaggggtggatatttatatggaatttgatgaagtttattgttgttttggaagagattcgggaggaggttttattaaaggttttatgttttagggatttagggtgagggtaaattggttttaattttaaaatttatttttttttttttttttcgttttattttgttcgtatttagtttttaaatggaagattatggtttttagttaggagaaatggattaagttttatttattagatgttcgtaggttggggtagtttcggtggtttttttttttttttgttagttagtgttaattttcgtggtttttaagttttcgttgttattttgttttattttttggggagagtttggttttgttgtggatggaattcggagattttagttttttgagtagtttttttttttttttggtgttgattagaggtttttgggtagtattagttaaagtaagagcgtatttattttggagtcgtttacgattaggacgtagagaagtaggcgcgttagtagggtttttatggtggcgaggtcggggcgttagacggcggttttgtaaaggaaggagaagttagggtaagaggcggaggaacgggaaggtaggttaggcgggcgattgtagcgtaggggagatgttcgcggtgattaggttttttagttgttttttttttttatgggtttcggatttcgggtagtttggatcggtattcgcgggggacgttcgggacggggcgttttgatttcgtgtagtcgtcggggagtttagggagttcgggtagtttagggcggggtaggtagacgttcgggagttggggtcgtcgcgtattcggttcggggattttaggatcgcggtatttatcggtggttgcggtaggagggcgcgagtcggcgttgcggggataggtggattttggttcgggtttcgggttgcggttttcgattgtgttgcgattcgcggcgtttgttttatattagggttcgtttcggcgtcgtttttttttttttcgttcggtttttttttttgttttgtagcgtttagcgattcggatttcgcgtgttttcgtaacgtttataaagatttgggggaagcgcgatttttagcggaggggatttaatagcgtttggattgaggaatcgagaggtttgtaaatttttcgtgtttttttttatgtatttgtcggggtttgttttagtgtaaggagttttcgaattgtagagaggagagaaggcgtataggagattttttattttagtttagttttgaagttttttgggttttttaattagtttttttgtaatttttttcgttgggttttaatttgtttaagattgttttagatttttttgtcgtagttggatggagttgtgagtttggtcgttggatggagttgtgaagtttttattacgcgataaatgtacgagatatatttttttaagaagtatagatagaaaaatttttgtttgtaggggttttttttgtgcgtttgtttagtggtagtttttagatattattaatataattagtggatggaataaagtcgggtttattgttttcggtagtaagggggtttgtttgatggtgttattagagggggaaaggtaaggttagattattgaaaatttgtagtttggtttaaagttcgtttttgatagggtttgataaggattgggttaggtgtcgtgatatgatgttataggattgtgggaataaagttttagggtataaattgttggtgttttttattgaa

SEQ ID NO: 182 - DNA, 2501 bp, Artificial Sequence
  chemically treated genomic DNA (Homo sapiens)
gtaaatttttatattttgaggagagatagggttttattatgttggttaggttggttttaaatttttgattttaggtgatttattcgttttggttttttaaagtgttgggattataggcgtgagttattaagtttgacgggtagtaatttattttttatataattttttttttttttttttggtagagacgaggttttgttatgttgtttaggttggtttaaaattatcgggtttaagtgatttgtttattcgggttttttaaagtgtagggattataagtatgaattattatgtttggttgtaattttttatatatttcggatattaattttttattagataatatagtttgtaaattttttttttttttattttgtaggttgtttttttattgttggttattttttttgttgtatagttatttttaagtttgttgtaaatttatttgtttattttttgttttgttgtttgtgttttgttgttatatttaagaaattattgttaaatttattgttatgaagtttttttttatgtttttttttaggagtattatagttttaggttttatgtttaatttttaataagttttgtgtttttgtatatggtgtaaggtaagggtttaattttatttttttgtatgtggttatatagtttttttagtattatttgttaaagatataattttttttttatgttttggtgttttaaaaaaaaaaaaaattttggttggttacggtggtttaggtttataattttagtattttgggaggttgaggtaagtggattgtttgaggttaggagttttagattagtttggttaatatggtgaaattttgtttttattatcgaagatataaaaattagttaggcgtggtggagtacgtttgtaattttagtttattagggaggttgaggtatgagaatcgtttgaatttgggaggtagaggttgtagtgagttaagattttattattgtacgttagtcggggtgatagagtgaggtagggttttattttgtcgtttaggtaggagtttagtggtttaattatggtttattgtagtttatattgttagggtttaagttatttttttattttagttttttaagtagttaggattataggtgtgtgttattatgtttagtaaatttttgtattttttgtagagatggggtatttttatgttgtttaggttggttttgaatttttaattttaagcgatttttttatttgggttttttaaagtattgggattataggcgtgagttattgcgtttgatatggtgttttttaatttatttttattttttatttttatttttttgagataaggttttgttttgttttttaggttggaatgtagtggtataattatggtttattgtaatttttgttttttcggtttaagtgatttttttgttttaatttttggagtagtttggattatgggtatatgttataacgattagttaatttttgtttttttttttttttttttttttttttttttttttttttttttttgagatgtagtttttttatgttatttaggttggtttaaaatttttgggtttaagcgatttttttattttggttttttaaagtgttgggatgataggcgtgagttacgtggtgtttaaaaaaggtaataaaaaattttttatatattgggtatagaagtggtatgggtttttatatattgtgagatttttggtattagttataaattttgtgtatatttaagattttttagagtaggtgtaattatttcgttttatagatgaggatatagaggttgagtcgtagtgatttatttaaggtcgtatagttagtaaatagatggaggttggattggaattgaggattttatttaagggtttttataaatttttgggggtttttcgttgttttatttttattatatttgaaagaatgaatgaatgaatgtttcgggtatcgtgtttattttttagtaaatcgtggagtttggacgagtttattgtttcgcgtggggggggtgtgtgttcgttttgcgtatgcgtgttttttgggtatggtcggtttcgttttatttttttgtatagggtatcgttttttttcgtttggtatattttttttttttttacgttcggattggggtggtagacgtcgttttcgtttatcgtttttttttatcggttttcgcgcgaaaagtcggggcgtttgcgttgtcgtcgtcgcgtttgttgaagttttcgagatgtcggcgcgtatcgttttagttcgggtgtttatattggtcgtttcggttatttcgttgttcgacgatgttcgtaggcggtaggtattatgggggggaatacggatttagggggataggtagggcgttgggtggggggtcgttttttttcggggtggtcggtggtcgttgttgatagacgggcgcgtatgcgtggggtggtgcggcgcgtagcggtagttggcgcgggtagggtggtattttcggtcgcgcgtgttcgggttg

SEQ ID NO: 183 - DNA, 2501 bp, Artificial Sequence
  chemically treated genomic DNA (Homo sapiens)
tagttcgggtacgcgcgatcggaagtgttattttgttcgcgttaattgtcgttgcgcgtcgtattattttacgtatgcgcgttcgtttgttagtagcggttatcggttatttcgaggggaagcgattttttatttagcgttttgtttgtttttttgagttcgtgtttttttttatggtatttatcgtttgcggatatcgtcgggtagcgagatggtcgggacggttagtgtgggtattcgggttggggcggtacgcgtcggtatttcggaggttttagtagacgcggcggcggtagcgtaggcgtttcggtttttcgcgcggaaatcgatggggaggggcgatgagcggaggcggcgtttattattttagttcgggcgtgggggaggaggggatgtattaaacggagagaggcgatattttgtgtagaaggatggaacggagtcggttatgtttagggaatacgtatgcgtaaggcgggtatatattttttttacgcggagtagtgggttcgtttaagttttacggtttgttgggaggtgggtacggtgttcgaggtatttatttatttatttttttaggtgtgatggggataaagtagcgagaagtttttaagggtttgtgagagtttttgagtaaagtttttagttttaatttaatttttatttatttgttggttatacgattttaggtgggttattacggtttagtttttgtgtttttatttgtaaaacggggtaattgtatttattttagaaaattttgagtatatatagaatttgtagttagtattaagaattttatagtgtatagaggtttatgttatttttatatttagtgtgtggggggttttttgttgttttttttaagtattacgtggtttacgtttgttattttagtattttgggaggttagggtgggaggatcgtttgagtttaggagttttagattagtttaggtaatatagagaaattgtattttaaaaaaaaaaaaaaagaaagaaagaaagaaagaaaaaaagaaaaataaaaattagttagtcgttgtggtatgtgtttatagtttaaattattttagaggttgaggtaggaagattatttgaatcggagaggtagaggttgtagtgagttatgattgtattattatattttagtttgggagatagagtaagattttgttttaaaaaaataaaaataaaaagtaagaataaattaagaagtattatgttaggcgtagtggtttacgtttgtaattttagtgttttgagaggtttaggtgggaggatcgtttgaggttaggagtttaagattagtttgagtaatatagggatattttatttttataaaaaatataaagatttgttgggtatggtgatatatatttgtaattttagttatttgggaggttgaggtgggaggatggtttgaattttggtagtgtaggttgtaatgagttatgattgggttattggatttttgtttgggcgatagggtaagattttgttttattttgttatttcggttggcgtgtagtggtgagattttggtttattgtaatttttgttttttaggtttaagcgatttttatgttttagtttttttagtaggttgggattataggcgtattttattacgtttggttaatttttgtattttcggtggtagagatagggttttattatgttggttaggttagtttgggatttttagttttaagtagtttatttgttttagttttttaaagtgttgggattataggtttaagttatcgtaattagttagaattttttttttttttaaagtattagaatatgggggaaagattgtgtttttaataaatggtgttgagaaaattgtataattatatataaaagaatgaagttggatttttattttatattatatataaaaatataaaatttattaaagattaaatataagatttgaaattatagtgtttttagaagaaaatatggggaaaagttttatgataatggatttggtaatgattttttggatatgatagtaaaatataggtaataagataaaagatagataaatgggtttgtaataaatttaaggatagttatatagtaaaagaaatgattaatagtgaaaaggtaatttatagaatggggaaaaaaaaagtttgtaaattgtattatttggtaaagggttaatattcggaatatatgaaaaattatagttaggtatggtggtttatgtttgtgatttttgtattttgggaggttcgggtaggtagattatttgagttcggtagttttagattagtttgagtaatatggtaaaatttcgtttttattaaaaaaagaagaaaaaaattatataaaaaataaattattattcgttaggtttggtggtttacgtttgtaattttagtattttgagaggttaaggcgggtggattatttgaggttaagagtttgagattagtttggttaatatggtgaaattttgtttttttttaaaatataaaaatttgt

SEQ ID NO: 184 - DNA, 6815 bp, Artificial Sequence
  chemically treated genomic DNA (Homo sapiens)
ttgtttgcgaattaaaaatttagagtttttttgtgaattatgttgttaagaattgtagatttaagttttaagattgtacgaatttaaattttgattttatggttttagttggtatgaagatataaagataattttttagtaaaaatagttttgaaagatcgggcgtgatggtttatgtttataattttagtattttgggaggttgaggcgggtggattatttgtggttaggagtttaggattagtttggttaatatggtgaaattttgttttaattaaatatataaaaaaattagttgggtgtggtggcggatatttgtaattttagttatttagggaggttgaggtaggagaatcgtttgaatttaggaggtagaggttgtagtgagtcgagattatattagtgtattttagtttgggtgataaaagtgaaattttgttttaaaaaaaaaaaaaaatggtagaatgttatatggaaagttaatttttagagatagtaatttagatatttataatattatattgtttttttaagtatttatattaataaattaattaatatttgttgatttaatatggttagggatagtgttgggtttttataatttttaagtaattttagttagattttgtttttaaggagtttatgagtagtatgaggagataaaaaatagataaataattttaatttaggaagaatttgataaatgtatgataattattattagaatttagaggagaggaaattttttttgaatagagattaaaggaaggaataatgaatgtggtagtatttgggttggatttattataagaggtatgtttttttttgataagttaagaaagtggggatttaaggtagaagaaaagaaaagttttgagtttttggagtattaaaattttgtttggttgaagtataggttatagtcggaggagatggattaggaaggatcgttatgggtagagaggaagttttgaatttatgggggaagttatgatttgggttaaagatagagttgggttatgttaagatggattttgaagtagtaaaaaaaaatttaagaaagtaaataggttgtagggtttaggatgaagttcgggaggaaagggtagagtggtttttaggaggtcgttaggataggtaaggtaatgggttttaaagggagtggtcgaaatgtaatggaaaaagagagattgtaaagttagaaggtttaggaattgttttttgattaggtgtggaaggtaagggaaaattagttttcgaagaagatagtgagattttaatttgggtggttggagagatagtgatgttgggtatagatacggggaagttgagaggaatattatgtttgagaatggtgatttatatttgaataagtttgtaatgtttagtagatcgttggaaaagtggggttggagatatatttaacggaggagttagattaatttttatttttttttatttgagagagttagtaagttacggttggaacgtgtgtgtttagtaggagagggtagggagggaagttaagagagttgggagttcgagtgaagtttttgttaaaggtagaagaggaaagtcggcgtagtatagtatatttttttatttatgtttattaagtttagggataaggtttattaagatgagtttggaagagaatgttggagagaaagtggttaagaaaattgtttttattgaattttttgggttaattttgattgtaagtttttgaataattaaagtttgtgaggagatagttaatttttttattttttttatgttaatagtgaataattgtagatttttttttttttttttttttttttttttgttttttttttttttttttttgaatatttttgtttttttttgggattggtttagagtatgggtggttattgttgatttataggaggtattattgttattaataaagggtaatagtttttttttttaatatttatttatatttagtatttatttttaatattgattatggagagagtttttttgtgtttaaatattgtaatattgggggttttttaaagtataaaaatatatatttgtatgatggtattattaatatttttatggttttttattttttttttgtattggttttaagagttatttataaattttttagtaattgtatagtgttttagggttagagatcggttatttttggtattgtgattagagttatttaatatttaaggtggtgattaatgtttggtaataaagtttttattgggtgttatgtgttttgggattttgagcgtgggtattttaggagtattttagtattgcgtgttagtattatggtcgagagaatagttgagaaagtggttaagaggtggatttatgtgaacgttattgggaaatgagagatttcgtttttaattacggttagtgtaattcgaaagtttaaaattagtttaaaataaaggtatttatttttattttatgtttatattttaggtttttaataatacgtattttttatatgtttatagaaagtagttaattgagttatttatggaaaggtttgtgggtttggttaacgaagtggaggagtattatattttagttggaaatatatttttagaatgttaaaatatttattttaaagtttggttttttggtgtaatcggaggtatggtaatgtttttgtttagagattgggggttagggttagtaaggtatttgatttatatgtattttagaaggtttttattgttaaattatattttttcggaaaaattatttatgttttattttgtaaatttgatatttatatatttttgattggtattttattttagtcgtaagattatgatttatagtaagtttgtttttttttttgtttggggtggtagtagaaagtatagggtattttttagtttttaagggtaggggtaaaggggttggggttttttttttttagtatagttttttttggttgtgttatattgttttttgtgagtagatagtaagtttttttttattttttattgttatttatttagcgttgtgtagtagtttagttgcgtgtttgtcgggaggggttgttaagtgttttgtttattggttgtttttcgaatttttgttattttacgtataaatatatttatatattttttttgtttagtttatatattgagttattcgtatatgcgagtatatttttttttttttttttattttttcggtttttgatttttataagtttatggaatatttttggaaagacgtttttgatttagtagggtaggtttgttttgatttttttttttgtagttttagtattttgagaaagtaatttatttttttggttagtgtttgtattttagtagggagatgaggattgttgttttttatgggggtatgtgtgtgtttttttttttttttaggatttgtaggattttttgtgttatttgtatataatttggtaggtttatattttttaagagttttatgaagtgttttttgtatgtgttttaaaaaggtatttgaaaattgaaagtgtgatttatggaaattaaattatttgtaaaaaattgttttggaaagtaatgattgttggttataaagggaaatatttgcgatgtatttaatgtgtttttaattttttatttgttgataatttatagttattaatgttaaattcgattttggttttagttatatttgtatattgtttaataatggtttatttttgtaagaattagataaaatgtatatttgatataaaatagttaaaaatgtaatttttagtaatagtaagtttggtatttagatagattatgaatatttcgttagatattttgttgggtgtttgggatagtaattaaaataaagtattgatagttgtattagagtttattaggttgtagtaaaggaagtttatttaaaagtataaattatttaagattatagacgtatgatatattttatttattttttgtttttttaatatgtatatatatatatatatatatatatatatatatatatgtgtgtgtgtatgtgcgtgtgtatgtttaatttttaatttagttaaaaatttttttttatttgttttttatttggatatttgattttgtatattttagtttaagtgaatcgagaagatcgagttgtaggattaaaggatagatatgtagaaatgtattttaaaaatttgttagttggattagatcgataatgtaatataattgttaaagttttggttcgtgatttgaggttatgtttggtatgaaaaggttatattttatatttagttttttgaagttttggttgtataattaatttgtggaaggtatgaatatttatgtgcgttttaattaaaggtttttttgaattattttttatatgagaatttttaatgggattaagtatagtattgtggtttaatataaatatataagttaggttgagagaattttagaaggttgtggaagggtttatttattttgggagtattttgtagaggaagaaattgaggttttggtaggttgtatttttttgatggtaaaatgtagttttttttatatgtatattttgaattttcgtttttttttttttagatgttttttgttagtttttttagttgttaaatatagttgtttgtggttggttgcgtatgtaatcgtatattttattttatttgttttatttcggttatagtgtagttttttttagggttattttatgtatatattacgtatttttagttaacgaggagggggaattaaatagaaagagagataaatagagatatatcggagtttggtacggggtatataaggtagtatattagagaaagtcggtttttggattcgtttttcgcgtttattttaagtttagttttttttgggttatttttagtagattttcgtgcgttttcgttttttggtcgtgaaatttagtttttatttagtagcgacgataagtaaagtaaagtttagggaagttgttttttgggatcgttttaaatcgagttgtgtttggagtgatgtttaagttaatgttagggtaaggtaatagtttttggtcgttttttagtatttttgtaatgtatatgagttcgggagattagtatttaaagttggaggttcgggagtttaggagttggcggagggcgttcgttttgggattgtatttgttttcgtcgggtcgttcggttttatcggattcgtaggttttcggggtagggtcggggttagagttcgcgtgtcggcgggatatgcgttgcgtcgtttttaatttcgggttgtgttttttttttaggtggttcgtcggtttttgagttttttgttttgcggggatacggtttgtattttgttcgcggttacggattatgattatgattttttatattaaagtatttgggatggttttattgtattagatttaagggaacgagttggagtttttgaatcgttcgtagtttaagatttttttggagcggtttttgggcgaggtgtatttggatagtagtaagttcgtcgtgtataattatttcgagggcgtcgtttacgagtttaacgtcgcggtcgtcgttaacgcgtaggtttacggttagatcggttttttttacggtttcgggtttgaggttgcggcgttcggttttaacggtttggggggtttttttttatttaatagcgtgttttcgagttcgttgatgttattgtattcgtcgtcgtagttgtcgttttttttgtagttttacggttagtaggtgttttattatttggagaacgagtttagcggttatacggtgcgcgaggtcggttcgtcggtattttataggtattcgcgttcgcgtcgttcgtcggggtggtcgtcgcgttcggtaggagggagggagggagggagggagaagggagagtttagggagttgcgggagtcgcgggacgcgcgattcgagggtgcgcgtagggagttcggggcgcgcggtttagttcgggggttttgcgtgtagttcgcgttgcgtttagagttaagttttttcgtcgggtagttgaaaaaaacgtattttttatttatttatcgttcgtgcgagaggtagattcgaaagttcgggttttttaataaaatatacgttggaaaattagataaagtagtagttatttgtgggggaaaatatttttaggtaaataaatacggggcgttttgagttatttgggaaggtttcgtttttggtatttaaagttgggggtgtttggagttagtagagtttagtagagttttatttatttttttaatgtttttgtttaatgtgttttttaaatttttttttatttagattatttgattggaaatatgttagttatgatgatgattttttgggaagcgatttttgttattcgttttttttttttttttattttacgttttggggttttagagagcgattgggagttgaatgggtttgatttcggagttagttggttgagttcgcgttggagcggattgttggtatgtgatttttgatagtcggaaatttgtaggtgtttcgcgagtttaaaataagttatatggaagtataagtgtttaaaaataattttttgttagtttagtgataagtttgttttattcggggagaatgtttcggagtggcgtgcgggttagttagggtttgcgtttcgtagttattgtggaaggagcgcggtcggtttaggatataggagattattttgtgattttaatggcgaaggttgtgtgtttttattttaatttttttttttataagaattgttttttttttttttttttttttttttatttttttttgtttagttttttttttt

SEQ ID NO: 185 - DNA, 6815 bp, Artificial Sequence
  chemically treated genomic DNA (Homo sapiens)
aaaaggagaaattgggtaagagaaaatgggagggagaggagagggagaaagaataatttttgtagggaaaaaaattaaaatgaggatatataattttcgttattgaagttataaagtggttttttgtgttttggatcggtcgcgttttttttatagtggttgcgaggcgtagattttggttgattcgtacgttatttcggggtatttttttcgggtgggataggtttgttattgggttggtaggagattatttttaagtatttgtgtttttatatggtttgttttaaattcgcgggatatttataaattttcggttgttagaagttatatgttagtaattcgttttagcgcggatttagttagttaatttcgaaattagatttatttaatttttaatcgttttttaaagttttaggacgtggggtggggaggaggggaaagcgggtgataggaatcgttttttagaaagttattattatagttgatatatttttaattaaatagtttagatgaaaggaaatttggggagtatattaaataaaaatattaaaaggataaataaaattttgttgagttttgttaattttaaatatttttaattttaaatgttaagagcgagatttttttaagtgatttaaagcgtttcgtgtttatttgtttggaggtgtttttttttataaataattgttgttttgtttggttttttaacgtgtgttttgttaggaagttcgggttttcgggtttgtttttcgtacggacggtaagtgggtggagagtacgttttttttagttgttcggcgagagaatttgattttgaacgtagcgcgggttgtacgtagaattttcgggttgggtcgcgcgtttcgggttttttgcgcgtattttcgggtcgcgcgtttcgcggttttcgtagttttttaggttttttttttttttttttttttttttttttttttgtcgggcgcggcggttatttcgacgggcggcgcgggcgcgggtatttgtagaatgtcggcgggtcggtttcgcgtatcgtgtagtcgttgggttcgttttttaggtagtagggtatttgttggtcgtggggttgtaggaaaggcgatagttgcggcggcgggtgtagtagtattagcgggttcggagatacgttgttgagtggggggaaattttttaggtcgttggagtcgaacgtcgtagttttagattcggggtcgtaggggaggtcggtttgatcgtagatttgcgcgttggcggcggtcgcggcgttgaattcgtaggcggcgttttcggggtagttgtatacggcgggtttgttgttgtttaggtatatttcgtttaggggtcgttttagggggattttgagttgcggacggtttaggggttttagttcgtttttttggatttgatgtagtagggttattttagatgttttggtgtggagggttatggttatggttcgtggtcgcgggtagggtgtagatcgtgttttcgtagggtagaaggtttagaaatcggcgggttatttggaaaaagagtatagttcgaggttagaggcgacgtagcgtatgtttcgtcgatacgcgagttttggtttcggttttgtttcgggagtttgcgggttcggtgaagtcgggcgattcgacgggagtaagtgtagttttaggacgaacgtttttcgttagtttttgggttttcgggtttttaattttaagtattggtttttcgagtttatatgtattataaaggtgttggaggacggttagggattgttgttttgttttgatattggtttaaatattattttaggtataattcgatttggagcgattttaaagagtagtttttttgaattttattttatttgtcgtcgttgttggatagaggttgagttttacggttagggggcgggggcgtacgaggatttgttaaaggtggtttagggaagattgggtttaaaataaacgcgaaagacggatttaggggtcggttttttttaatgtgttgttttatgtgtttcgtgttagatttcgatatatttttgtttgtttttttttttgtttgatttttttttttcgttggttagaaatacgtagtgtgtatataggatgattttggggaggattatattgtaatcgagatagggtagatagaatggggtgtgcggttgtatacgtagttagttatagatagttatatttagtagttgggggaattgatagggggtatttgaggggaagggggcggagatttagggtatatatataggaagagttgtattttgttattaggagaatgtaatttgttaggattttagtttttttttttgtaaaatgtttttaaagtagatagatttttttataattttttgagatttttttagtttgatttgtgtgtttatgttggattatagtattgtatttggttttattaggaatttttatgtgaaggatgatttagaaaaatttttggttagggcgtatatgggtgtttatgttttttataggttggttatgtaattaaaattttagaaaattgaatataaaatgtgatttttttatattaaatataattttaggttacgaattaaagttttggtaattatgttatattgtcggtttggtttagttaatagatttttaaaatgtatttttgtatgtttattttttagttttataattcgattttttcggtttatttgggttaggatatgtagaattaaatatttagatgaaaaataaatagaaaaaagtttttaattgaattaaaagttaaatatgtatacgtatatatatatatatatatatgtgtatatatatatatatatatatatatatatatattaaggagataaaaaataggtgaagtatattatgcgtttataattttggatagtttatatttttgaataaattttttttgttgtagtttaatagattttgatataattattaatattttgttttaattgttattttaaatatttaatagagtatttgacgaagtgtttatggtttatttaaatgttaagtttattgttattaagagttatatttttgattattttatattaagtatatattttatttaatttttataaaaatagattattgttggataatatgtaaatgtagttgaagttaaaatcgagtttagtattaatgattatagattgttagtaaataaagggttaaaaatatattaggtgtatcgtagatatttttttttatggttagtaattattattttttaaagtaattttttatagatgatttaatttttataaattatatttttaatttttaaatgtttttttaaaatatatgtaaaaagtattttatagggtttttaaaaaatgtgaatttgttaaattatatgtaaatggtataaagaattttataagttttgaaagaaaaaggagatatatatatatttttatggagaatagtaatttttatttttttgttaggatatagatattagttagaaaggtaagttgtttttttaaaatgttaaagttatagagagagaaattaaaataagtttattttgttggattaagaacgtttttttagaaatgttttatgggtttgtagaagttaagggtcgagagagtgagaaggaaggaaggaatgtgttcgtatgtgcgagtggtttagtgtgtgaattaggtagagagagtgtgtggatgtgtttgtgcgtggaatggtagggattcgggaagtagttagtaggtagggtatttggtagtttttttcggtagatacgtagttgggttattgtatagcgttggatgaatggtagtggggagtgaggggagatttgttgtttgtttatagggagtagtgtggtatagttagagaaagttgtattggggaggagaaattttagtttttttgtttttatttttggaggttggaaagtattttatgttttttgttgttattttaagtaagaggaaaaataggtttgttgtgaattatagttttacggttaaaatagaatgttagttaaaagtgtatggatattaagtttataaaataggatatgggtggttttttcgaaagaatataatttaataataaaagttttttgggatatatgtggattaaatgttttattggttttagtttttagtttttgaatagaggtattgttatgttttcgattgtattaggaaattagattttggaataaatgttttggtattttagggatgtgtttttagttgaaatgtaatatttttttatttcgttaattaaatttataaatttttttatgaatagtttagttgattgttttttgtaaatatgtgaaaaatacgtattattaaaagtttaggatatgaatataagataaaggtagatatttttgttttaaattgattttaggttttcgagttgtattgatcgtgattgggaacgaggttttttattttttagtggcgtttatatggatttattttttgattatttttttaattattttttcggttatagtattaatacgtaatattgaggtgtttttagagtgtttacgtttagggttttaggatatatgatatttaatggaggttttgttgttagatattagttattattttggatattaaatgattttaattataatgttaggagtggtcggtttttggttttgggatattatgtagttattgagagatttatgagtggtttttgagattagtataaaaaagaaatagaaagttataaaaatgttaatgatgttattatgtaaatatatgtttttgtgttttgaaagatttttagtattgtagtgtttgagtataggagagttttttttatagttagtattgaaaataaatattggatataaataaatattgaaaagaaagattgttattttttgttggtgatagtggtgttttttgtaggttaataatggttatttatgttttagattagttttagaaaaaagtaagagtatttagggagggaggagagaggaataggggaaaggagaaggaaaggaaaggggatttgtaattgtttattattgatataggaagaataagaaggttagttgtttttttataggttttgattgtttagagatttataattaaagttagtttaagaagtttagtaaaggtagtttttttaattattttttttttagtatttttttttaaatttattttggtgagttttgtttttgggtttggtgagtatgggtgggaaagtatattgtgttacgtcgattttttttttttgtttttggtaaaaattttattcgggtttttagtttttttggtttttttttttatttttttttgttggatatatacgttttagtcgtgatttattggtttttttaggtgaagaagggtaaagattgatttggttttttcgttgaatgtgtttttagttttatttttttagcggtttgttgggtattgtaggtttgtttaaatatgagttattatttttaaatatggtgttttttttaattttttcgtgtttgtgtttagtattattgtttttttagttatttagattaaaattttattgtttttttcgagggttgatttttttttgttttttatatttaattaagaggtaatttttaagttttttagttttataatttttttttttttattgtatttcggttattttttttgagatttattattttatttgttttaacggttttttaaggattattttgtttttttttttcggattttattttaaattttgtaatttgtttatttttttggatttttttttattgttttaggatttattttgatatgatttagttttgtttttaatttaaattatagttttttttatgagtttagggttttttttttgtttataacgattttttttagtttatttttttcgattgtaatttatgttttagttaagtaaaattttaatattttaagaatttaaggtttttttttttttttattttaaatttttatttttttggtttgttaggggaaagtatgttttttgtaataggtttagtttaaatgttattatatttattatttttttttttagtttttatttaaagaaaatttttttttttttgaattttagtagtagttattatgtatttattaaattttttttgaattagagttatttatttgttttttatttttttatgttgtttataagttttttgaggataaggtttggttagaattatttgggaattatgagaatttagtattgtttttggttatgttaagttaataaatgttggttaatttattgatatagatatttaaaaggataatgtaatattataggtgtttggattattatttttaaaagttaattttttatgtgatattttattatttttttttttttttgagatagagttttatttttgttatttaggttggagtatattggtgtgatttcggtttattgtaatttttgttttttgggtttaagcgatttttttgttttagtttttttaagtagttgggattataggtgttcgttattatatttagttaatttttttgtatgtttagttgagataggattttattatgttggttaggttggttttgaatttttgattataggtgatttattcgttttaattttttaaagtgttgggattataggtatgagttattacgttcggttttttaaaattgtttttgttagaagattatttttgtatttttatgttaattgaggttataaagttaaaatttaaattcgtataattttgaggtttaagtttgtaatttttggtagtatgatttataagagagttttgaatttttagttcgtaagtag

SEQ ID NO: 186 - DNA, 8020 bp, Artificial Sequence
  chemically treated genomic DNA (Homo sapiens)
ggcgtatatttgtaattttagttattcgggaggttgaggtaggagaattgtttgaatttgggaggtggaggtggaggttgcggtgagttgagattgcgttattgtattttagtttgggtaataagagtaaaattttattttttaaaataaaataaaataaaataaaataaaataaaataaaaaagtaattaaaaaatttattgaagtttttataagaaataaaatttttataatggaaattttagttgattaaatttttatgtaattaaataagtatgagtgataggttttgtgttttgtttagtaatttaataattttttaattttttgaaagtagaattattttaatttttatttgaaaaatttttataagagtttagaaaagagttatgtaaattgatatttaagttatatgggtttgggtaatttatttttagtgtttattgttaagatgatataggatatattaggtttttttttttttgtagggttttattttgttatttaggttgagtgttgtggtgtaattaaagtttattgaaattttaaatttcggggtttaagtaattttttaattttaattttttaagtagttgggattataggtatgcgttattatgtttggttaattttttgtattttttgtagagatagggttttattatgttgtttaggttggttttgaatttttgagtttaagattcgtttaattcggttttttaaagtgttgggattataggtgggagttattatatttggtttattaggtttttatttagtagagagaagatattaaagtaatatatttttaagttttttatgtattattttttttttttttttatataggaaatggtttgaagataatgatatagtgtgattttttgaaattttttttgggtagtggaagggtttagattttttttttttaatttaattagatgaagagtgagagtaagtagtatttaagagtatatagataggtatatatatgtatttgtattttaattattagggtcgtgttagtacggaaagtatttaataaagatttgatagatcgatttttagatgttgaattacgtgttttagtggtaaagattttaatggttttgttaaaattttagtgagtttttaagtattttaagatgttaaatatttgttttttatttggaaaatgtttataaatgttttatggggatatatttttattttaaaatttattatgaataaatattttgtaataaatagtaattaaagtatatttgttttaatttttgtagtaaaagattttataagagtaattaagaggtaattatttaaataataattatagaatttgtttataaaaaatatatataatatatatattttagagagatagggttttgttttgttttttaggttggagtatagtggtataattatgggttattgtagttttgattttttagatttaagttatttttttattttagttttttaagtatttgggattatagcgaatgttattatatttggttaatatttaaaaatttttcgtagatacggttttattatgttttttaggttggttttaaatttttgattttaagtaattttttcgttttagttttttaaagtgttgggattataggtatgaattattgggtttggtttttaaaattatttttgatatagtattgtgttattattttgtaaatatagtttaaattaaatttttttaatgaatgtaatatatttattataatgtaatataggaattattaatagtaaatttttgatgtgagggaaattttatttttataaagtttagttttttattaaagtttattttaggatagtaattaatttttttaaaatataaaaggttatttatttatttaggcgaagtttcgttttgttatttaggttggagtgtagtagtagattttggtttattgtaatttttattttttaggtttaagtgatttttttgttttaatttttgagtagttgggattatattaggtttagttaatttttgtgtttttggtagagatagggttttattatgttggataggttggttttaaatttttgattttaagtgattcgtttgtttcggttttttaaagtgttaggattataggcgtaagttattgtatttggtttaaaaaggttttttttttaatttatttaaaggaggttaagtattttaaggtataagagtcgtttatttaaaatagtaaatttagtatatttattttttttagattaaaattaatatatttcgtattagtaaaataaataatgttatttgttttttttttttttttttttgagaaggagttttgttttattttgtaggttggagtgtagtggtacgatttcggtttattgtaattttcgttttttgggtttaagtgatttttttgttttagttttttgagtagttgggattataggagtatgttattatgtttggtttttttgtatttttagtagatatagggttttgttatgttggttaggttggttttaaatttttgattttaggtgatttatttattttggttttttaaagtgttgggagtataggtatgagttattgtcggtaggttgataattttattgtttttgaagagggcgtttaattattttattgtgataaaattttgtttgtttgttttttgagatggagtttcgttttgttgtttaggttggagtgtaatggtacgattttagtttattgtaatttttatttttttatttcgagtgatttttttgttttagttttttgaatagttgggattgtaggtttgtgttattaagtttggttaatttttgtattttttgtagagatagggttttattatgttggttagtttggttttgaatttttgattttatgatttgtttatttcggttttttaaagtgttgggattataggtgtgagttatcgcgtttagtcgtaataaattttttaattttgaaaaatatattatttgggatgagttattagtaaagtataattttatatgtagtagtataaaaaatgtttagatgtttagggttttttttaaaattttattattttggaagattaataatagttttattaaataattttatatatgaatgaaaaatggagaaaaattttattaagatgttaattttattaaaatgaaatgggttatttttttttttcgttagaaaaaaaaaggttgggaaaataaaatttataagttggttttttttttttttttttttttacgagttggttttaaggttatttttaatatttattttttttaatgatattaatatatcgttatttatttgattttaaaattgtaattggttagttttaagtgaatataagtgttatgtttttgtagttttattatatttaatttgtaatttatttaataaaagattttaaatttataatgtatgtacggtgattaaaatatgagtatttttttaagttttgttattataacgtttgtttttttgggagtataatgatatggtttttttttttttttttttttgagacggagtttcgttcggtcgtttaggttggagtgtagtgatgcgattttggtttatagtaattttcgtttttcgggtttaagcgatttttttgttttagttttcggaggaattgggattataggcgttcgttattacgttcggttgattattcgtatttttggtagagatggggttttattatgttggttaggttagtttcgaatttttgattttaagtgatttatttgtttcggtttttaaatataatgatttgttttaaggttgtaagtatttttattaggtatttatggggtgagtagggtggggtagatgtgtttcggaatggggtatagcggataggaagtaacggtttataataacgtgaacgtttttgacgtgtagcgggagttttagaaagcgtggtcgaatttgtagtttttaataaatggttcgtttttaaattttagttttaattttttttgagcgataggggtatgttattagtacggggggaaatgagatataagaaacgttcgaaagggaaaaataaggttgggttgttttttttttttggggttaagatagaggtatagaaggtttaggtttgggaggttggattattttcggttggatgttgagtcgggtgggagtttaaatagtagggggtttataggaggtcggtttaggtagtttcgcgtttatttattaggttaggtttaggtacgtttttagcgatagtaggtttaggtacgttcgggggtttgtttagttttcgttttcgttgtttcgggttacgggggttttttcgttttcgtttcgtttttcgggtttcgtagtaggggtttttttgggtttcgatttttttcggttttttattttagatatgtttggagattttaggacgataagtttagggtagtttttttattagggggagtaggacgtggtcgttttggcgttcgtgggaattttgggcggtgatcgcgtttttttatagatttggtatcgtttagagtttagtttttttttttttttcggtattttcgttgttttattgagttttttagttgttagttttatagtttttttaggagaggtgggcggcgattttaatttatagcgttttttattgcgatattgttttaaattcgaggaaatttaaattttcgggcgcgcgtaggtcgacgggattcgaggaggaggggtaggacgaaggggtcgcgcgcgttacgtcgggcgcgtcgtcgttgttcgagttcggtattggtgggaacgcggcgcgtttttgaggtttagttacgtttcgttcgcggggtaggcgggtatttttacgcgcgcgggtatgagtcgtggtaggagtgcgcggcggtagcggtggtcgttttttggggtttggggtgtgtttatttgtataagcgggcgcgcgtcgttcgggttgggtggattcggcgggatttgattgtttcgttgtttagaggcggagaagaagaggtagcgagtggacgtgattgttttatttcgggtaaaagggatagaattagaggtggggagtttgggtagtcggcgattcgcgaagatttgaggtgtcgtagcggtattcggagtagcgtcgggtttttttcggggtgtagtcgtcgtcgggggaagggcgttataggtcgggaagattttttttttttgtgtttagtagtggggtttatcggagggcggttcgtgggtcgggttttatcgcggcgtttcgggattgtggggttaggttgcgttgggtggacgtttatttcgttaattttcggaggtttttgggggttttcgtgcgtttcggggttgtagagatttaggggaggcgtttgtgaggttcggatttgtttcggggcgaagggtatgtggcgagatagagttttgtatttttaattttcggtggaaaatttttgttgtcgtttttttttatcggtttggagttttttagttttgtttcggtagtgtcgttttttttattaagatttaggcgtaaaggtttgggtaagttgattttttcgttttttttttcgagttaggttttttggaggtttggtagttgattttagggattgagaatttgaggatatggaatatttgataattattttgtttttgtattaggaagagaaattttgtaatgaggaagtagtaaatttggggttttcgtggataaacgtgcgttgttttttgttttacgtttatgaagagttttggttttttattttgttgtgggttataaaaggttttgagatttagtttagataagttgtgtagttttaaaacgtatttaagatttgtatattttagtttaataggattaggtgaaattggaaattagttttagaaaattagagtgttttatttgtttagttattggatattatttaaaaaatttatttatttttgtttttttatatcgaattttattattataaattaaggaatattttatgtttaagaggataaaaacgttattaatattttaaaaaatgagagttttgattcgaattaataattttttattagttttgtgtttttgttgggtattttgtaagttttgataagtataggtaaatgttttacgttcgtttttgtttttttaagtgttatatttggtgattttaaaaatagttattgaagtttgataattattgtttttttttgtgagttttaagttatttgtgttttgtttttgtatttcgggtatttatatttttatttttttttttttttttttttttgagtagattgtgaattattttaggtaaatgatttaattttttttgtagttttggtgtttgatatatagggaggggtataaatgtgtattgaatgaatgaattgataaattcgtttagatttttttattttatatattgtgtaaagttttgttaatgttttgaaaatttgtagatattgtgaattgggttttatgtttatggaaaaatttgtattatatttgaaataaagttgttagaaacgttaagtattttattataaaggttgttattttttttttatgtttttttggtttgagaaattatattagaaagtgttttttgttgttttgtgggaaatgtgtttagtaaggaggatttagagttgatattttttttgaacgagaattaatatttaatagtaataatgttttatttatttttatgtttgataaggaaaataagaagttttttaatattaggattttaatgtaattattattttatataattttaattaaaaaaggaagtattttattgtaagaaatgataatgtgtgttaaaaaaaattgatagtagaggtcgggtatggtggggtttataagtgtaattttagtattttcggaggttgtggcgggtggattatttgaggttaggaatttaagattagtttggttaatatggtgaaatttcgtttgtattaaaaaaaaaaaaaaaataagataaggtgggggagaaattttaaattttgttatttagaagtaatttaaatatttcgatgaataaatttttaaacgtttatatatatttatatgatattaatatttgtttttttttttgagatagagttttagtttgtcgtttaggttggagtatagtagagtggtttcggtttattgtaatttttgtcgttttggtttaagtagtttttttgttttagtttttcgagtagttgggattataggtatttgttattgtatttggttaattttgtatttttagtagagatagggttttattattttggttaggttggttttgaatttttgatttcgtgatttattcgtttcggttttttaaagtgttgggattataggtatgagttattgcgttcggtttttacgttatgtgttgtatgtgggattatgtttttgtttttttttttttttttttttagtaatagtattatgaatatttttttatgttaatatatggagatatgtgttataattttgaatggttgtataatattttattttatatatatattttaatttttaaaatttatatttagaatgatggatatttaggttgcgtttattattgaaatattttttattaatttttttttttttttattttttattttagttttttaatgtgttgggattataggtttgagttattatatttgattggaaatttattaattttttttgtggatatttttatatatgtatttgaatgtttttttgaagtaaatttttagaaatgggatttttgggttagagagaaagtttattttaaataattttatattttattgttttttagaaaaattgtatttattttttagtttttttaattagtgtataagaatggttatttttttatatttttttaagtattgggttttgtttatttaaaaatttttgttaaggaaaaaaaattagttttgttttttttacgttttttgtttattagtgagattatgtatttttttatatttttattggtttgataaatattttggtgttttggttgtagt

SEQ ID NO: 187 - DNA, 8020 bp, Artificial Sequence
  chemically treated genomic DNA (Homo sapiens)
gttatagttaaaatattaaaatatttgttaggttaataaaaatatgaaaagatatataattttattaataaataagaaacgtaaaaagaataaaattgattttttttttttggtaaaaatttttaaatggataaaatttagtgtttggaaaggtatgagaaaatggttatttttatgtattaattggggaaattagaaaatgaatgtaatttttttggaaagtagtaagatatggaattgtttaaaataagttttttttttaatttagaaattttatttttaaggatttattttaaggagatatttaaatatatatgtaaaaatatttataaggagaattaatgagtttttaattaggtgtggtagtttaagtttataattttagtatattgggaggttagagtaaaaaataaaaagaaaaaagaattaatggaggatgttttagtgatgaacgtaatttaaatgtttattattttgaatatagattttaaaaattagggtatgtatataaaatggaatattatgtagttatttaaaattatgatatatatttttatgtattgatatggaaagatgtttataatattgttgttgaaaaaaaaaaaaaaaaaaaatagaaatatgattttatatataatatataacgtgggggtcgggcgtagtggtttatgtttgtaattttagtattttgggaggtcgaggcgggtggattacgaggttaggaatttaagattagtttggttaagatggtgaaattttgtttttattaaaaatataaaattagttagatgtagtggtaggtgtttgtaattttagttgttcgggaggttgaagtaagagaattgtttgaattagggcggtagaggttgtagtgagtcgagattattttattgtattttagtttgggcgatagattgagattttgttttaaaaaaaaaaataagtgttggtattatatgaatatatatagacgtttagaagtttatttatcgaaatgtttgagttatttttgagtagtaaaatttgggattttttttttattttgttttattttttttttttttttagtatagacggggttttattatgttgattaggttggttttgaatttttgattttaggtgatttattcgttatagttttcgaaagtgttgggattatatttgtgagttttattatgttcggtttttattgttaattttttttagtatatattattattttttataataaaatatttttttttttaattaagattgtataaaatagtgattatattgaagttttaatattaagagattttttgttttttttattaaatataagagtgaatagagtattgttattattgagtattagttttcgtttaaggaggatgttagttttaggttttttttgttaaatatattttttataaagtaataggaaatattttttgatgtgattttttagattaggaggatatgaggaaagaataatagtttttatagtaaaatatttgacgtttttagtaattttattttaaatataatgtaaatttttttatgggtataaaatttagtttataatatttgtaagtttttaaaatattaatagaattttatataatgtatagagtgaaagagtttaaacgggtttattaatttatttatttaatatatatttgtgtttttttttatatgttagatattaagattatagaaaagattgagttatttgtttgaaataatttatagtttatttaaagaagaaaaagagagagagagtgggaatgtgaatgttcgaagtgtaaaaatagagtataagtaatttggagtttatagaagggggtaataattattaagttttaatgattgtttttgaagttattaaatgtagtatttggaaaaatagggacggacgtagggtatttgtttatgtttgttaaggtttataaaatgtttagtaggggtataaaattgataaaaagttattgattcgaattaaaatttttattttttaaaatgttaataacgtttttgtttttttaaatataaaatgttttttaatttatagtaatgaaattcgatgtgaaaaaataagaatgaatgaattttttaggtgatgtttaatagttaagtaaataagatattttggttttttgaaattaatttttaattttatttagttttgttaaattaaaatatgtaaattttaaatacgttttaaaattgtataatttatttgaattaagttttaaaattttttgtaatttataataaaatggaaagttaaaattttttatggacgtaaaatagaaaatagcgtacgtttatttacgaaaattttaagtttattatttttttattatagaatttttttttttggtataggagtaggatggttattaaatattttatgtttttaaatttttagtttttgaaattagttattaagtttttaaagaatttggttcggggagaaaagcgaggaggttaatttatttaagtttttgcgtttaggttttagtggggagggcggtattgtcgggataagattgggagattttaggtcggtggagggaaacggtaataggagttttttatcgggaattaggggtgtagggttttgtttcgttatatatttttcgtttcggggtaggttcgggttttataggcgttttttttggatttttgtagtttcggggcgtacgaagatttttagggattttcgaaggttggcgaggtgggcgtttatttaacgtagtttgattttatagtttcggagcgtcgcggtgaggttcggtttacgggtcgtttttcggtggattttattattggatataaagggaggaggttttttcggtttgtggcgtttttttttcgacggcggttgtatttcggagggagttcggcgttatttcggatgtcgttgcggtattttaagttttcgcgggtcgtcgattgtttagattttttatttttggttttattttttttgttcgggatagagtagttacgtttattcgttattttttttttttcgtttttggatagcggagtagttaaatttcgtcggatttatttagttcggacggcgcgcgttcgtttatgtaaataaatatattttaagttttaaggggcggttatcgttgtcgtcgcgtatttttgttacggtttatgttcgcgcgcgtagaagtgttcgtttatttcgcggacggggcgtggttaagttttagggacgcgtcgcgtttttattaatgtcggattcgggtagcggcggcgcgttcgacgtggcgcgcgcgattttttcgttttgtttttttttttcgggtttcgtcggtttgcgcgcgttcgggagtttgaattttttcggatttggagtaatatcgtagtggaaggcgttgtgggttgaggtcgtcgtttattttttttaggggaattatggagttggtagttgaaagatttagtgaagtaacgaggatgtcggggagagggaaggggttgggttttgggcggtgttaagtttgtgagggggcgcggttatcgtttagggtttttacgaacgttaaggcggttacgttttgttttttttggtgaagaagttgttttgggtttgtcgttttagggtttttagatatgtttgaggtgaagagtcggaagaagtcggggtttaagggagtttttgttgcggagttcgggaagcggagcgagggcgggaagattttcgtggttcggagtagcggaggcgggggttgggtagattttcgaacgtgtttgagtttgttgtcgttggggacgtgtttgggtttggtttggtaagtggacgcgaggttgtttgggtcggttttttgtgggttttttgttgtttgggtttttattcggtttaatatttagtcggaggtgatttaattttttagatttgggttttttgtgtttttgttttgattttaaaggaaggaaatagtttagttttgtttttttttttcgggcgttttttgtattttattttttttcgtgttggtagtatgtttttatcgtttagaaggagttgaggttaaggtttgggaacgagttatttgttaagagttgtagattcggttacgttttttgaagttttcgttatacgttagaagcgtttacgttgttataaatcgttattttttgttcgttgtgttttatttcgggatatatttgttttattttatttattttataaatatttaatggaaatatttgtaattttaaaatagattattatgtttggagatcgaggtaggtggattatttgaggttaggagttcgagattagtttggttaatatggtgaaattttatttttattaaaaatacgaataattagtcgggcgtggtggcgggcgtttgtagttttagttttttcggaggttgaggtaggagaatcgtttgaattcgggaggcggaggttgttatgagttaagatcgtattattgtattttagtttgggcgatcgagcgagatttcgttttaaaaaaaaaaaaaaaagaaaattatattattatgtttttaaaggagtaaacgttatagtagtagagtttggaggagtgtttatattttgattatcgtgtatgtattatgaatttaaggttttttattaagtaagttatagattgaatatggtaaagttataaaaatatagtatttgtgtttatttaaaattaattagttgtagttttaaaattaggtaaatggcgatatattggtgttattaggaaaaatgaatattagaaataattttaaaattaattcgtaaaaaaagaaaaaagaaaaaaattaatttgtgaattttatttttttagtttttttttttttggcgggaggagggaatagtttattttattttaataagattggtattttaatagaatttttttttattttttatttatgtgtaaagttatttagtaagattgttgttaattttttagagtgatagaattttagaagagattttggatatttagatattttttatgttattatatatggaattatattttattggtgatttattttaaatagtgtattttttagagttaaaagatttgttacggttgggcgcggtggtttatatttgtaattttagtattttgggaggtcgaggtgggtagattatgaggttaggagtttaagattaggttggttaatatggtgaaattttgtttttataaaaaatataaaaattagttaggtttggtggtataaatttgtaattttagttatttaggaggttgaggtaggagaattattcgaaatggggaggtggaggttgtagtgagttgggatcgtgttattgtattttagtttgggtaatagagcgagattttattttaaaaaataaataaataaaattttgttataataaagtgattaaacgttttttttaaaaataatagaattgttagtttgtcggtagtggtttatgtttgtatttttagtattttgggaggttaaggtgggtggattatttgaggttaggagtttgagattagtttggttaatatagtaaaattttgtgtttattaaaaatataaaaaagttaggtatggtggtatgtttttgtaattttagttatttaggaggttgaggtaggaaaattatttgaatttaagaggcggaggttgtagtgagtcgaaatcgtgttattgtattttagtttgtaggatggagtaaaatttttttttaaaaaaaaaaaaaaaaaaagtagatagtattatttattttattaatacggaatatgttaattttgatttgaaaggaataaatgtattgaatttattgttttaaataaacggtttttatgttttaaaatgtttgattttttttaagtaaattgaaaaaaaaatttttttgggttaggtgtagtggtttgcgtttgtaattttagtattttgggaggtcgaggtaggcgaattatttgaggttaggaatttgagattagtttgtttaatatggtgaaattttatttttattaaaaatataaaaattagttgggtttggtgtaattttagttatttagaggttgaggtaggagaattatttgaatttgggaggtggaggttgtagtgagttaagatttgttattgtattttagtttggataatagagcgagatttcgtttaaataaataagtaattttttgtgttttgggaaagttagttattattttgggataagttttaatagaaaattaaattttatgggaataaaattttttttatattaggaatttgttgttagtgatttttgtattatattgtaatgaatgtattatatttattaggaagatttaatttgaattatgtttgtaaaatgataatataatgttatattaaaaataattttgggggttagatttagtggtttatgtttataattttaatattttgggaaattgaggcgagagaattgtttgaggttaggagtttgaaattagtttgggaaatatagtgagatcgtgtttacgaaaaatttttaaatattagttaagtgtggtggtattcgttgtagttttaggtatttgggaggttgaggtgagaagatagtttgagtttgggaagttaaagttgtagtaatttatgattatattattgtgttttagtttgagagatagagtaagattttgtttttttaaaatgtatgtattatatgtgttttttatgggtagattttataattattatttaaatagttgttttttagttgtttttgtgaaattttttgttgtaaaaattgaagtaaatgtattttggttgttgtttattgtaaaatatttatttatagtaaattttgaaataaaaatatatttttataagatatttgtaaatattttttagataaaaagtaagtatttggtattttaaaatatttaaaagtttattagaattttgataaagttattgagatttttattattaaaatacgtaatttagtatttaaaagtcggtttattaaatttttattaaatgtttttcgtattgatacggttttggtggttaaaatataagtgtatatgtgtgtttgtttgtgtatttttaaatattgtttatttttattttttatttgattaagttggagggaaaaaatttgaatttttttattgtttaagaaggattttaaggaattatattatattattgtttttagattattttttatgtggaaagaaaagagaaataatatataagaaatttaaaagtgtgttgttttaatattttttttttgttaaataaaggtttgataggttaggtgtggtggtttttatttgtaattttagtattttgggaggtcgagttgggcggattttgagtttaggagtttaagattagtttgggtaatatggtaaaattttgtttttataaaaaatataaaaaattagttaggtatggtggcgtatgtttgtagttttagttatttggggggttgaggttggaggattgtttgagtttcggaatttgaggttttagtgagttttgattgtattatagtatttagtttgggtgataaagtgagattttgtaaaaaaaaaaaggtttgatatattttatgttattttgataataaatattggagataagttgtttaaatttatatggtttgagtgttagtttgtatagtttttttttaaatttttatagaaattttttaggtaagaattgaggtgattttatttttagaaagttaaaaagttgttaaattattaaataagatataaaatttgttatttatgtttatttaattatatagaaatttaattagttggaatttttattgtgaaaattttgttttttatggaaattttaatagattttttaattgtttttttgttttgttttgttttgttttgttttgttttgttttgagagatggagttttgtttttgttgtttaggttggagtgtagtggcgtaattttagtttatcgtaatttttatttttattttttaggtttaagtaatttttttgttttagtttttcgagtagttgggattataggtgtgcgtt

SEQ ID NO: 188 - DNA, 6523 bp, Artificial Sequence
  chemically treated genomic DNA (Homo sapiens)
gttggaaggagtgttttgatattaggtaggcgcgggttattgagttttttgggatttaaataggatgtgtatgtgggaggagggaatgggtgggaagaatttacgtttggttgagttttggttagttcgaggtgattttttagttttgggttgtaaggtttaggtttttggtgttagcggagaaggagagaatgagggagtttatcgatttttaaggcgtacgagtgaagagtatagagtgaaggtttggttttttatggtttttgttttagtttaagaattcgtatttacgaataggggagcgttaggggaggggtaattttgggtcgtgtttggagtgtaggtcggtagggagtaaagttatttttgttattgttttttttggagtaggatttttaggttttttgtttggaggaggaggggcggggaattcgtaaaatttaataaagtaaaaaggggaggaggaaggaggggatttggcggggtttttgaggcggtttaagtattagtgtttttattttggtttgatttgttcgttattgaaagggtcgtgttcgtcgttggcgttcgggaagagagtcgggtcggttagttgtgcgcgtttattaatttgtcgggcgggcggcgggcgggcgggttgggggttgtttgtaattttgttgtttcggtcgtcgcggttttcggggagcgggtttcggcgttcgtttttattggtcgtcgtcgcgttagttggtgcgatttgttgttgtcgtttttggcgttcggttatttagaaataaattagttcgatgattattaatagttatagttagatgtattaatatataataaattatagttttgtagaggggcgcgtaaatgagtttttattttgtgaattttatttttttcgggagtttttttagcggttaggatttttttttgggttagttgtttttttattaggttggttatgacgcgttgaggtttttttcggtttcgtacggggcgtcgagtttttcggataagacgtatattttattttgtttttattaatagtttaattcggttttggtttgtaatcgggcgttttacgagtacggggtttcgtgtttttattttgataaggattttagtggcgtttcgttttcgggtagtggtaagtagaggggtttcggggattatttgtatttttttttcgagtagtagtataaattcgatagtagtagcgggtagggtaaagtattttatgacgaaggcgtcgatcggaagtatacgagttcggtttatttttggatgtagcggatgaatttttgcgcgggtaagatatattttaagatagtggagggagaggggaaaggaggtaggaaaagaaagaaagaaggaggaaatagagtagaaagaggaatagagagaaagaaaggatgaaagaattagtaaagtttttttggttttttaaaagagaagaaaaaattagtttttaatggggttattaggttatggtagaggaagggtaaggttttagtgtttatgtaagttgatattttaggggaggatgggggtattggtacgtatatgagatttgtgatagggatagtttgaagagagagagaggttggtggggagggatagtttgtttatgtattttgagtattttgtttagttttttaagttagagggttttttgtattgcgttattgataaatattttttgttttttaatttttttttttttttgttttttagaaattcgtatagagaggtggttatttggttttttttagtgtttttttaaagttttggagggttatagttttagatttaggatttttttttttttttttttttatttttttcggtttttatttaattgtttatttttagttaatttttgtttttttttgagtttatgtttgagttttatatatttgttttggagggattttttattatttttggggaattttggtattagattagatagtttaatataattttatattgttagaaattttagattatttatagttttattttttagtttttggtttttaaggattttatagggaattttaaagatttttaggaattttttaggatagagtttaatgcggattgttaaaattataatgttttttattaatatttattttatttttgggggagttttgtattttttagaagggttatataatttgggagaatgtgtaaagatttaagagggttgattatttttaattttttaaaaaatgtgttgagtttcgatatggttggttatagtagtatttttagagagattattatgaatttagagtgtgtatattatttatatggttttatattatttattttagatatatatatatatatatatataaatatatatatatattttgtatttttataaaaatacgatttgggtattttaaattaagaatgtttattttgttattttgtttgtaatggtttttttatgaggtagattttttaaaaacgataatgtttattttaagtcgttataggtggaaaatatttcgtttggtatgaaataattttttatttagtatgttttgggttttagatatagtgggagaggttggagtggaggcggggtggtttttagtttgggtgttttttgtgggaggtattgggttgattgggttaattttttaggttttggtttatcggcgttcggtcgtttttgttcgtaggtgttgtgtatgggagttatgggcgtcgaggtcgttagatttatacgcgttattagatattggagttggagaaggagttttattttaatcgttatttgatacggcgtcgtcgtatcgagatcgttaacgcgttttgttttatcgagcgttagattaagatttggttttagaatcgtcgtatgaagtggaaaaaggaaaataagtttattaattttacgtagtttagcggggaggatttagaggtaaaggcgggcgagtagatgtttgggtagggattaggttagcgttgtaatttttttcggttttgtttttttgttttcgtttgttttttaattttttttttcgtttgtttttatttgggggttttcgtagttttaggggagttcggagttttgtaagcgtttgtgtatttattttttataaaataaaataaaataaaataaaataaaataaaataaaataaaataaaattttatatatagttaatattagcggtggagcggggcgtattgtatatatttagtttcgttttataaggatgtttaaatcggtttcggagttttggggtgcgttttgaatgcgtttggggtttttgtgttagtgtttttgagtttttcgatttcgggacgcggggttgttggggaggaaagagttttgggtcgagtttcgtttcgtgtttgggcgtttttgtttaagtttttcgttagtaagtttcgaagggtattattaaattatttttggttagtggaaagagggggtttaagagttggagttcggttttgtcgcggttttttaagtcgttttttagaataggaaggaagttcgaggaataaagggggttttaatagagtttagtttttcggtttcgcgtgtgtaatcgttagtggaagagaagtagttttagtcgaggcgagttaatttgggcgcgggtggaatattatagttcggggtaggttttcggtttcggattttcgtttttagttttcgatagcgttcgcgtcgtcgttatagtagcgtttaggatttaacgaggggtttagggttatgggagtcgttagagttttggtttttagacgtgttaggggcgtttgtaacgtcgggtttttagcggggagattttatttgttttttagttatatttgtgatttatttgagtttttcggagtcgtggaaaataattatagagatattaggtattgttaaggaatgtttttattatcgtttttattttatttttggaggtttaagtaagattttagtaattcgttttacggatttttagattttaggtagtttttgtggttgtagggagtttgggtttattcgttgggtttaaggagaatttttcgatttggggttcggttggttcgaggaatcggattttgtgatgaagattttttaggttggatacgtaagtaaattaaatcgtaaattaatgatacgaaaattatatttatacgaaagaaaaatcgattacggttataaaagtgtatggaatttgatttcgttttggagaaatattatataaaagttatttttaatagacgtttgttatttaagagcggtagggatattgttttttatgcgttcgtaaaaatagagtcgtaattgtagttgttgttgttgcgggtaggatttatttttttaattggttaaatggttttttttttttttcgaaggtgatatttgtatttttaaaatttagagttgttggtaggacggttagtatcgattttaatttcgatataaaaataagaggggttgtaaaacgggggaaataaagttgttgtaaataaaatgtaagttattatttttttttaattttttgtattttcgtcgggcgcgcgatcggtagttgacggtttaataattggtatattttaatggaattgcgagggaaatgtaataattttgttataatgggttgtaattttaattcgatttcggtttttgtagttttcggtcggaagttgggcgatgagttttgtttttagcgggtggcgttcgagttcggttgaacggcggtaattggcggcgggtacgcgttcggggcgcgcgcgttatttttttcgtttttatttaatttttttattagtgtacgagtttatttttagaggttattaggtaggatttacgattggataataaaagtacgtgattcgaagtcgtattttatatttgggtgtttacgtaggagggaattaagtatatgttttagttatttttataatttattataaattgtgtaagggtgttatagacgtataaacgatcgcgagttataaattaagtatatatattaaaaaataaatgagtttttattttgtaaatttattttgcggtcgttatttaaatggttcggattattagttgtataattatggagattatagtttcgtgagcgagtaatttagggattcggcgagtatgtatttcggtaggtacggttacggttataatggtatggattttagcgtcggtcgttcgggtttcggttattttggtttcggagagcgcgttcgtagttacgttgttagcgttagcgcggcgttcgtcgagtttaggtatagttagtcggttacgtttacgtattttttttagttcgattcgttgttttgtttcgtcgtggttttttcgttcggtagcgatagttattacggcgggaaaaattttttaagtaattttagcggcgtttcggtcgacgtcggtagtatttatattagtagtagagagggggttggtacggcgttcggagtcgaggaggacgtttttgttagtagcgagtaggcgagtgcgtagagcgagtcgagttcggcgtcgttcgtttaattttagatttatttttggatgcgtaagttgtatataagttatggtaaagttagtttttttttaaatttacgcgatcgcggggacgcggttttcggtttttttttttttttttgtcgtttttttttagttttttttggttttattttttttagttttgcggagttttttttgtcgtttttttttttttgttttttttttttttttttttttttgcgagtattttgcgtttataaatagtgggggaaatgggcgttttttgggatagtttagacgttggaagggggaggaagtaaaaaatttttttggaattttacgttttgggacgcgttttcgggttaggttagtcgagtaaggcgtagagaggtagaggatggttgtagtagtcgtgaatcgggtttgttacggcggataatttatgaggagggttacgttggggaaatagcgttattaattatagttttcgaaaaggggtttgggggaaagaatcgaggcgagagtttgtaggattttgaattttgggggtaggagggagagagaaggaaagggaagaaaaagaaaataggttttttaattttgtaggttggaaacgggaggcggttttcggggttggaattttgagggagggtgattcgaaggttatttgggcgtttaggaaagggttttgttttttgggtttttgtgcggtgggtagtttgggagggttgtgtttttcgatcggggcgttcggggtagggcggagggggtaggagaggggttagggaaagtcggagttcgtcgggatacggttttagttttagatgggtagattgtttttagggtttaaatcgtattgttttttttttagaaaggaagagagaaggaaattcgggaggggtgtgcgggttggtaggtagaatttgttgagtttttcgtttgggttttttgtttatgatttaagtttgtttttttggcggattttggaagataggagttggtggttaaatcgttgatttttttattgtaga

SEQ ID NO: 189 - DNA, 6523 bp, Artificial Sequence
  chemically treated genomic DNA (Homo sapiens)
tttgtaatagaaaagttagcggtttagttattaatttttgttttttaaagttcgttagggggataagtttgggttatgagtagggaatttaggcgaaaagtttaataagttttgtttattagttcgtatatttttttcgaatttttttttttttttttttttagaaagaaaataatacgatttggattttgggaataatttgtttatttgaggttggggtcgtgtttcggcggatttcggttttttttggttttttttttgtttttttcgttttgtttcgggcgtttcgatcgggaggtatagtttttttaggttgtttatcgtatagaaatttaggaagtaaggtttttttttgagcgtttaagtggttttcgggttatttttttttaaagttttagtttcgagagtcgtttttcgtttttagtttgtagggttggggagtttgttttttttttttttttttttttttttttttttttttgtttttaaaatttagaattttgtaggttttcgtttcgatttttttttttaagttttttttcgggggttgtaattagtaacgttgtttttttagcgtagttttttttataaattattcgtcgtgataagttcgatttacggttgttatagttattttttatttttttgcgttttgttcggttggtttgattcgggagcgcgttttaaggcgtggggttttagaggggttttttgtttttttttttttttaacgtttaaattgttttagagaacgtttattttttttattatttgtgagcgtagggtgttcgtaaagaagaggaggaaggaggaaggtaggggagggagaacggtaaggagagtttcgtagggttgggagaaatgagattaagagagattgggagagggcggtagagaagagaggggggatcgagagtcgcgttttcgcggtcgcgtggatttagaaaaaggttggttttattatgatttatgtgtagtttgcgtatttaggggtagatttggggttgggcgggcggcgtcgggttcggttcgttttgcgtattcgtttgttcgttgttggtaggggcgtttttttcggtttcggacgtcgtgttaattttttttttgttgttgatgtgggtgttgtcggcgtcggtcgaggcgtcgttggagttgtttagggagtttttttcgtcgtggtggttgtcgttgtcgggcgagggggttacggcggagtagggtagcggatcgggttgaggagagtgcgtggacgtggtcggttggttgtatttgggttcggcgggcgtcgcgttggcgttggtagcgtagttgcgggcgcgtttttcggagttaaagtggtcggagttcgagcggtcgacgttgagatttatgttattgtagtcgtagtcgtatttgtcggagtgtatgttcgtcgagtttttgaattgttcgtttacggaattatgatttttataattatgtaattggtagttcgggttatttggatagcgatcgtaaaatgagtttataaaataagagtttatttgttttttgatatgtgtgtttgatttgtggttcgcggtcgtttgtgcgtttatagtatttttgtataatttatgatgaattatggaaatgattgggatatgtatttggtttttttttacgtaggtatttaaatatggggtacgatttcgaattacgtgtttttgttgtttagtcgtaaattttgtttgatgatttttagaggtaaattcgtgtattaataggggagttgggtggaggcgaggggggtggcgcgcgcgtttcgggcgcgtgttcgtcgttagttgtcgtcgtttagtcggattcgagcgttattcgttggaggtagggtttatcgtttagttttcgatcgggggttgtaagggtcggggtcgaattgaggttatagtttattatggtaaaattattgtatttttttcgtagttttattaggatgtattaattgttaggtcgttagttgtcgatcgcgcgttcggcgaggatgtagaggattggggggaggtggtgatttgtattttatttataataattttatttttttcgttttgtagttttttttatttttgtgtcgaggttggggtcggtattgatcgttttgttagtagttttgaattttgaaaatatagatattattttcggggaagggggaaagttatttagttaattggagaaataaattttgttcgtagtagtagtagttataattacggttttgtttttgcgagcgtatgagggatagtgtttttgtcgtttttaaatgataggcgtttattaaagatagtttttgtgtagtgtttttttaaggcgaggttaaattttatatatttttataatcgtagtcgatttttttttcgtgtgaatatggttttcgtgttattagtttgcgatttgatttgtttacgtatttagtttggaaaatttttattatagggttcggtttttcgagttagtcgggttttaagtcggagggttttttttgaatttagcgagtgggtttaggttttttgtagttatagaggttgtttggggtttggggattcgtggggcgggttattggggttttgtttagatttttaggagtaaaatgagggcgataatggaagtattttttggtagtgtttagtatttttgtagttattttttacggtttcgaaagatttaagtaaattataaatatagttgagaggtaagtggagttttttcgttggaggttcggcgttgtaggcgtttttggtacgtttggaagttaggattttggcggtttttatggttttgggtttttcgttgggttttgaacgttgttgtggcggcgacgcgggcgttatcggaggttgggagcgggaattcggagtcgggagtttatttcgggttgtaatgttttattcgcgtttaggttaattcgtttcggttgaggttgttttttttttattgacggttgtatacgcgggatcgagagattgggttttgttggggttttttttgtttttcgagttttttttttgttttgggaggcggtttgggaggtcgcgataaggtcgggttttagtttttagattttttttttttattggttagagatgatttgatgatgtttttcgggatttattggcgagggatttaggtagagacgtttagatacgaaacggggttcggtttagggtttttttttttttagtagtttcgcgtttcgaggtcggggagtttagagatattagtataggagttttagacgtatttagggcgtattttagaatttcggagtcggtttgggtatttttgtggagcgggattgggtgtgtgtagtgcgtttcgttttatcgttggtattggttgtgtgtgaggttttgttttgttttgttttgttttgttttgttttgttttgttttgttttgtaagaaataaatgtatagacgtttgtaaagtttcgggtttttttgaagttgcggaagtttttagatgggagtaggcggggagaaaagttggggaataggcgagggtaagggggtaaagtcgaaggaggttgtagcgttggtttggtttttgtttaggtatttattcgttcgtttttgtttttgagtttttttcgttgggttgcgtggaattgatgagtttgtttttttttttttattttatgcggcggttttggaattagattttgatttggcgttcggtgaggtagagcgcgttggcgatttcgatgcggcggcgtcgtgttaggtagcggttgaagtggaattttttttttagttttagtgtttggtagcgcgtgtaggtttggcggtttcggcgtttatggtttttatatatagtatttacgagtagaaacggtcgggcgtcggtaagttagggtttggagggttgatttagttagtttagtgttttttataagaggtatttagattagaaattatttcgtttttattttagttttttttattatgtttggggtttaaagtatattgaatgggagattattttatattaagcgagatgttttttatttataacgatttggggtggatattatcgtttttgaaaaatttgttttataggaaaattattataagtaaaataatagaatgagtatttttaatttgggatgtttaggtcgtgtttttgtggggatgtagggtgtgtgtgtgtgtttgtgtgtgtgtgtgtgtgtgtgtttggggtgggtggtgtggaattatgtaagtagtgtatatattttgaatttatagtggtttttttgaggatgttattgtgattagttatgtcggaatttaatatattttttgaagagttaaaaatggttagtttttttgaatttttatatatttttttaaattatatgatttttttgagaaatgtagaatttttttaaggataaagtggatgttaatggaaaatattataattttaataattcgtattaggttttgttttagggaatttttaggagtttttgggattttttgtggagtttttggaaattagaggttaagagatggagttataggtagtttaggatttttggtaatgtaggattgtgttgggttgtttgatttggtgttaaagttttttaagggtggtggggggtttttttaagataggtgtatgaagtttaggtatgggtttagaagagggtagaagttggttaagagtgggtagttgagtagaagtcgggggagatgagggaggagagagaaaaaaattttgagtttggggttgtggttttttaaggttttggggagatattggaagaggttaaatggttatttttttgtacgggtttttgaagggtagaaaggagagggggttgggaagtaaagggtatttattagtgacgtagtgtaaaaggttttttggtttgggaagttgagtagggtatttagggtgtatggataggttgtttttttttattagtttttttttttttttaggttgtttttgttataggttttatatacgtgttagtgtttttatttttttttaaggtgttagtttatatggatattggggttttgttttttttttgttatggtttgatagttttattgggaattgattttttttttttttttaagaagttaaagaaattttgttggtttttttattttttttttttttttatttttttttttattttgttttttttttttttttttttttttttgtttttttttttttttttttttattgttttgggatatgttttattcgcgtaggagtttattcgttgtatttaagggtaaatcgggttcgtgtattttcggtcggcgttttcgttatggagtgttttgttttgttcgttgttgttgtcgggtttgtattgttgttcgggagaaaagtgtaggtagttttcggggtttttttgtttgttattgttcgagggcgaggcgttattgaggtttttattagaatagaaatacgaggtttcgtattcgtaggacgttcggttgtaggttaggatcgagttggattgttggtagaaataaggtgaggtgtacgttttgttcgggagattcgacgtttcgtacgaggtcgggaagggttttagcgcgttatagttagtttggtagaggggtagttggtttaagaaggagttttggtcgttgggaaggttttcggggaaagtgggatttataaaataggaatttatttgcgcgtttttttgtaggattgtgatttgttgtgtattagtatatttggttataattattagtagttatcgaattggtttgtttttggatggtcgaacgttaaaagcgatagtagtaaatcgtattagttgacgcggcggcggttaatgggagcgaacgtcggagttcgtttttcggggatcgcggcgatcgaggtagtaaagttataaatagtttttagttcgttcgttcgtcgttcgttcggtagattaatgggcgcgtatagttagtcggttcggtttttttttcgaacgttagcggcgggtacggtttttttagtggcgagtagattaggttagagtagggatattaatgtttgggtcgttttaaaggtttcgttaggtttttttttttttttttttttttttgttttattgaattttgcgggtttttcgtttttttttttttaaataggaaatttgaaggttttgttttaggaggggtagtgataaaggtggttttgttttttgtcggtttgtattttaggtacggtttagagttgttttttttttagcgtttttttattcgtgggtgcgagtttttgagttggagtaagggttatgagaaattaggtttttattttatgttttttattcgtgcgttttaggaatcggtgaatttttttatttttttttttttcgttagtattaggggtttgggttttgtagtttagagttgaaggattatttcgagttgattaggatttagttaaacgtaggttttttttatttattttttttttttatatatatattttgtttgagttttaaggggtttaatggttcgcgtttgtttggtgttaaagtattttttttagt

SEQ ID NO: 190 - DNA, 10224 bp, Artificial Sequence
  chemically treated genomic DNA (Homo sapiens)
agtttttatagttttagtatcgttttttttattttatttcgattgcgtttttgttgtttatttttgtttatttattttaattttagtgttttttttagtttttgggttttaggtgatatattagttagtgggatatgggtttttataggtatttttagtttaatttagttttttttttttttttggttttttggttagtatttgtattatattggtttttattggatatttttgtagtttcgggttttttttatagatatattgttggattagttgtttaatttggtttatttgtagagttttttggtttatttgattttaattgaaatttagttttttaagaaggatttggtgttggaataggtaggtattggaaagttagttgtttaggattattgttttattttattagtatttttttgttattttttattttttttttttagattttagaaatttgggagcggttggagcgagaaaatagaggtaagtggtaggtaattgttaagtattagttttagtatgtgtttagttttttagagtaggatttgcggttgtaggcgcgaaggtaaggtttgtggaaatggtagggagggtggaggggatgtaggaggtatggatgtgggtggggtgtttttattttttagggttagttagatttttttgatttttttttaggtgggttgagatttataggttggatgtgttagaggtagtggttttagagcggtttcgttgtgtttattgtagtgtagaggtttttaagcgttgtttacgatgttagaatgagtggtattgttgtaggtgagggtattttagaattttggatttttaagttttatttttatattttttatatgtattgttatttttaatatttatttgtttgtagggagtgttaagttaagtattgggaaaagtatggaaagatttgtgttttggtagtttagggtgatagagttaaatgagggttgtagttgttgagggtcgattatttatgttaagggaatttatttagaatgtatttttgaattttaagattacggtttagtttttgtcggagttttagttttcgtagtggagagtagagcgggcggtaaagttgttgatcgattttttttttttttattttaagtgaaggttcgagattttttgttttatttagtgggtaggttaagtgtgttgttttagtaaatcggattaggagggttagggtcggatgtggggattttttttttttagtatagtaaagttggtttttagaaatacgggtattttcgcgtggtgttttgcggtcgtcgtcgttgtggtcgttcggggtggggtgtgaggaggggacgaaggagggaaggaagggtaaggcggggggggttttgcgagagcgcgtttagtttcgttttcgggttttatagtttttgtatttaggtttttattgcgcggttttttttagttttttttcgtcgtttagtttggattttgggggaggcgttgaagtcggggttcgttttgtggtttcgttcggttcgcgtttgttagcgtttaaagttagcgaagtacgggtttaatcgggttatgtcgggggagtttgagtttattgagttgcgggagttggtattcgttgggcgcgttgggaagggtcgtattcggttggagcgtgttaacgcgttgcgtatcgcgcggggtatcgcgtgtaattttatacggtagttggtttttggtcgtggttatcgtttttagttcgcggggttcgttacgtatacgtggtgcgatttttgtggcgattttatttggggcgtcgtgcgtaaaggtttgtagtgcgcgcgtgagtagtggtttcgcgcgtttacgagagcggaaggggtagttaaggggtagcgtagtcgtcgcgggttaagtcgcggtagagggggtcggcggggatagttttcgaggattaggttcgttattttcgttttatcgttgaagagtgcgcgaaaatggtttattttttgtcgtattttattcgtatttgggttatagatgagtagaggtggttgtttatatgtaaaaatacgttgattttaagttttttatttttaaaatgttttggttttttttgagaaagggtttgtgtttattgttttcggagtttatttttttaggtttgtttttttttaaatatttatgattttttttagaatttttagggtgaagggaaattattatttatgggagggagtttggaaaaatttagaatttttggtgggttttttgtaagtaggagttttgttgagtttttatttagtaaatatttttttttgatttagtgaattagatgttaaaatatgtacgtagttatatatttagtagtttttttgtatttttgggaatcgttagtaagtaaaggttgtttttttttgggtagatattagttggaattattaggggtgtttttatagtttttttcgttagtttggattttatcgtagatttgttgaattaattgttgggagtggattttaggtattagtaaattttaaaaattttttaaattattgtaatatggagtttgggttgagtattattgttttggtttatttaggaatttgtggatggatagtgttttaggtttgtgtgtgtatggagatttttttattcggtataagaggatattataaatttagttggggggagtataaagttgtgatagaatgtaaagaatgaataaggggtcgagcgcggtggtttatgtttgtaattttagtatttcggaaggcggaggcgggtggattatttgaggttaggagtttaagattagtttggttaatatggtgaaattttatgtttattaaaaaataaaaaaaaatgagttaggcgtagtggcgggtgtttgtaattttagttattcgggaggttgaggtgggagaattgtttgaatataggaggcggaggttgtagtgagtcgagatcgtgttattgttttttagttttggcgatagagtgagattttgttttaaaaaaaaaaaaaaaaaaaaaaagaataaggttgggatattgtagcgtttttaaagagaaataaagtagttatggagataagaagtaggatgatttgggtatgtttattagaggtagagataagggagaaattaaagataagtttgggtttttgtttttagtaattgggagtttagtggttatttttgttgtaaagaggaagttgggtaagtgtagtagtgaggttgaagaaaagggaattaaattttggttatgtttatttgaaacgttttttagatattttagtgaaggtattggtacggaggatttagtttgagggtttaggttagtgttttagtcgtggatttggggtagatgaatgtagatagattaggttagtgattaggattgagtttagattttatcgtgagatatggaagttgagttagaatttgtaaaggagttgagtaggagttgtagggggtaggaggaaaattgggagagtgtagtttttgggagttaaagggagtaagttttaaatgatgttgagggggtgagaatggagaatggaatattggattttatttggtagtatatagatcgttgaggattttgtttcgggtagttttttggaggaagaggtaagtttggttggagtgggtagaggggagagtgaaggcgaaggattagagtgtatagagattagtgttttggtttgaggggagtagagataggtgataattatagggtagacgtaggttaaaggtgtttagttttttttttaagtaaatgggtagatgtattttatatacgtttttagtgaagggtcgggtgcggtggtttaagtttgtagttttagtattttggaaggtcgaggcgggtggattatttgagattaggagtttgagattagtttggttaatatggtgaaatttcgtttttattaaaaatataaaaattagttgggtatggtggcgggcgtttgtaattttaggtatttaggaggttgaggtagaagaatcgtttgaatttaggaggcggaggttgcggtgagtcgaaatcgcgttattgtattttagtttgggtgataaaagtaagacgtagttttttgttgttgtttttttaattgttaatgaggaaaggggaagttttgtgttaggcgatagagatttaattgttgagtaggtttttttgtttgtggtttttcggtcggtttttagacgtttaggtggttaatattagagttcgcgtagtagtgtgaggtaatttattgagataggtcgggtttgcggagtttggcgagtagcggttttttttttggggtttttttttaattttcgggatattttttcgatttggagttttttcgttttatcgttaggtttttttgtagattgtaagtttatttgttattatcgttgtcgcgcgttcgtttgtttggattgttgcgggtttcgggatttgggttgggaattcgcggtggagcgggatacgaacgtggtgagcgcggggtcgagggcgtatgggaagggcgaggatgggtaggttatagtgtaggtattttcgagggttgtttgggtgtcgcgcgtaaggagcgttttaattgtcgatttttcggcggtatagagaggttaattttgcgcgggggttgggaggggagtttggattgtcggtttcgtaagtattttattcgttgtaagcggattcgggtttaggttgatttaggtttcgcgtacgcgtatttttcgtattttttcgttttcgttttcggttagaggttatttttgtgcgtttgttcggacgttggtattcgttttcgttttttgtggtaggtggggtttgtgagtggagtttcggagcgatgaggttatttttgggggcgaagcgtgcgtgttttcgtttcggcgtttttgttttaatgagataagagttagatttcggcgatttacgttttagttttaacggttgcggcgcggttttggttcgggcgtacgcgtatattgatacgcgtatacgtacgtacgcgatcggggcggtggttggcggttacggacgcgtaggattgggggacgggcgggtacggttatgggcgaggcggaggcgttttttttcgaaatgatttggagtagtacgacgagtagtggttattgtagttaagaggattcggattcggagttcgagtagtattttatcgcgcgaatttcgttagttcgtaggtcgcgtcgggattaggtgggagttagggggtgtcggcgggcgggaggggaagcggtcgttggagtttcgtttttttcggttcgttgtcgcgttttgggtcggtgggtagttttatttttttggttacgtggtttttcgcgggttttggtcggggatttgttcgcggaatcgtgcgtaagatttcgattttatcgtttagatgttgggtgtcggggtttttttggtttttgttatagataggttgaatacggaaaaagtagttgtatggtttgtggtagatttgagtcgggtattatttagttatgattaaagtcgatcgagtagtttggattagtatttcgattttcgcgttcgaatgtttttgttttttttttggggagattaggggaggatgtggagagggaagagttttcgttaggaattgagaagtatgtttaggaaaatttgagaggtagagagagattttgtttttttatttgtatttttgtatggagttagttgagtttttattttttttttgttttggtttgttattagttgttggaatgtggaagattttgttttttttttttagggtggatttggagaaagatttgggaatagataggaaagaagttttgttttggattataagtatttaggagtattttatttataggaagggggaaagttagattataaaatgtttaaagaggtggaaaaagagatttaggttattaatttaggattgtaaggtgtttcggaattttttaggtatttttattatcggagaattgtgtgttagatgttattggtgtgattattaggtttagagaattaggtttaggtattaggaaaaagaaatagggattgtgaagtttagtatgtttggtagaaatggggcggaaatttttatttaagtaaagaaagtggagttgtgagtgatgttttagataaaattttataaaattttttataaaatgggtggtgtttagtacgttaaaattttagtttagagtttgggtgtaagggttgagttgagtgtagatttttgggtttgtttttatgttagttagttttgagttattttttattgtggaaaggtgggaaaattataagatattaattaattgaaaaggagggttagttacggaggtgtatatttgtaattttagttatttgggagggtgaggtagaaggattatttgaatttgggaggtagaggttgtagtgagttaagatcgtgttattgtattttagtttgagtgatagagtgagattttgttttaaaaatagaaaaggaagttaagtacggtggtttatatttttaatgttaatgttttgggaggttaaggtaggtggattatttgtaattaggaattcgaggttagtttggttaatatggtgaaattttatttttattaaatatataaaaattagtcgggtatggtggtgtgtgattgtagttttagttatttgggagattgaattattttaatcgggaggtaaaggttgtagtgagttaagatcgtgttattgtattttaatttgggtgatagggtgaggttttgttttaaaaaaaagaaagaaggttgggtttggtgatttatgtttgtaattttagtattttgggaggttaaggtaggtagattatttgaggttaagagttcgagatttgttaggttaatatagtaaaatttcgtttgtattgaaaatataaaaaaattatttggttatggtggtgtgtgtttgtaattttagttattggggaggttgaggtaggagtattatttgaatttagaagatagaggttgtagtgagtcgagattgggttattgtattttagtttggatgagagagtaagattttgttttaaaaaaaaaaaaaaaaaaaaagaaagaataggaggttgagaagttttaagttatatgttaaaaaaaaagaaaaaaatattagttttaggttaggtgtagtggtttatatttttaattttagtattttggaaagtcgaggtgggtggattatgaggttaggagtttaagattagtttggttaaaatggtgaaatttcgtttcgattaaaaatataaaaaattagttagttgtggtggtaggtatttgtaattttagttatttgggaggttgaagtagagaattgtttgaatttaggaggtagagattgtaatgagttaagatcgtattattgtattttagtttggaaaatagagcgagattttgttttaaaaaaaaaattattagtttttatggatagtggtagagtggagggtgggtttttatggtgtagaagggaaattttatggttttgttgtgtattcgattgggatggttgttgaaatttttttttagtaggtagttttggaaatagaaaaagaaatttttttttttttagaattttggaagggttgtgtagtgtttttaatttaagtttgttttttgagtgaagatagggaggtttattattagaagggaaggggttggaaatgaggttattgtattttagtttagggtttttgggttatttaggaagggaagaaggagtaagtttttttattgttaggtaggagtttagagttattataagaataagttagtattatttttgtgttttttttgttttgtaaataaaatgatttttttttttgttttggtattagagtttgtttggtattttttttgtttttagtattttttttatttgggtattttttttcgttggtgtattgaataaatatatttattgttttatttatagtttttagtttttattttttagggtttatattatttgtttttattaattcgataaggttgtttattgtttttagtaaggtttgtattggggtttttattttagtgtttttttttatttaggagatttttggatatttggggaagaaaatgagtttaaatttttatttttttttttttattttttttttgtaaggttttggttttagtttttagttttatatttttgttggttgtagaatagtagcgggttttgggtaaggagtattttgttaaaacgttttattttgtttttttatttgttttttttatttgtttttattagatggtttaagtgtttaaggggattttagggcggagttagggagaattttggtttttttgggttaggtataagattattttataggaaattttgtgggaatttttttgggataaagtattggttagcgttgagtttagttgtgtttgtgatattcgtattttaattagggtttatttgacgttaataggaagtaaggttgatgtagtggggttaagggagtttgggagaagaaagtcggtttagagttttggttgttttgttttatattttattttttcggtaagaatttagtttttagatgaggtggggagtgagtggtcgagttaaaaatttttgggtcgggtacgatggtttacgtttgtaattttagtattttgggaggtgaaggtaggcggattatttgaggttaggagtttaagattaatttggttaatgtggtgaaattttatttttattaaaaatataaaaattagtcgggtgttgttgtggtacgcgtttgtagttttagttattcgggagtttgaggtaggagaatcgtttgaatttaggaggtagaatttgtagtgagttaagatttagttattgtattatagtttgggcgatagagtgaggtttcgttttaaaaaaaaaaaaaatttttgggttaaatttttagatagtataggtaggtgtagaaatttattaggaagttgtttgtgtatttttggtagattggagtttggtttaaagttgttttttatgtagtttgggttaaggttaaatattatgttatagtgattttttttattatgtgtgagatatggagaattggttttaagtattattttgtttattggtggttggattattgatgtgtattattttttattttttttattttgtagtgggttatggtttcgtgtcggggtagaggagaaaaatgggttgttttttttaggataaatttttattttaatttaattagggtgttgtgattagaatgtgtaattgaggtgtgattttattgattttttttttttttgagatcgagtttcgtttttgttgtttaggttggagtgcgatggtacgattttagtttattgtaatttttatttttcgagtttgagtaatttttttgttttagttttttaagtagttgggattataggtatgtgttattacgtttggttaattttgtatttttagtagagacggggtttttttatgttggttaggttggttttaaatttttgattttaggtgatttattcgtttcggttttttaaagtgttagaattataggcgtgagttaacgtgtttagtttgtttttgttttttgtgttttgaagtagggttttatttagttttttaggttggagtgtagtgatacgataatagtttattgtagttgtaatttttcgggtttaaacgatttttttattttagttttttgaatagttgggattataggtatattattatatttggttaatttttttttttttttttttagtagagatgaggttttgttatgttgtttaagttggttttaaatttttgaggattaagtgatttttttattttagttttttaaaatgttgggattgtagatgtgagttattatatttagtttgattttattttaaatgagagtttttttttagagttttttagttgtttttggtttttggttatgtgtttttagttgtttttgtttttgtggtatttttaaggttatatttagtgttgaggttttaggtaggtagtagagagaagttaaatgattttgttttttttttatttatttagagtatgtaaaattaggagtagtggtgggtttagggtgggtattagttatgtatatgtatattagggatagggggttaaaggtagttagtttttaaagattgttttagaggttattttttagagaagttttgggttttttaagggttttgtgtttatgttggtttattttgtagg

SEQ ID NO: 191 - DNA, 10224 bp, Artificial Sequence
  chemically treated genomic DNA (Homo sapiens)
tttgtaagatgggttagtatggatatagggtttttgaggaatttagggtttttttgaaaaatggtttttggggtagtttttggaaattgattgtttttggttttttgtttttgatgtatatatatatagttggtgtttattttgaatttattattgtttttggttttgtatgttttgggtggataagggaaagatagaattatttggtttttttttgttgtttgtttagggttttagtattgaatgtagttttaaggatattatagaagtaggggtaattgaaggtatatggttaggggttaggaatagttgagggattttgaagagggatttttatttaaagtaaaattaggttgggtgtggtggtttatatttgtaattttagtattttgggaggttaaggtaggaggattatttgatttttaggagtttgagattagtttgggtaatatagtaagattttatttttattaaaaaaagaaaaaaaaaaattagttaggtgtggtggtgtgtttgtagttttaattgtttaggaggttgaggtgggaggatcgtttgagttcgggagattgtagttatagtaagttattatcgtgttattgtattttagtttggggaattgagtgagattttgttttaaaatataaaaaataaaaataggttgggtacgttggtttacgtttgtaattttagtattttgggaggtcgaggcgggtggattatttgaggttaggagtttgagattagtttgattaatatggagaaatttcgtttttattaaaaatataaaattagttaggcgtggtggtatatgtttgtaattttagttatttaggaggttgaggtaggagaattgtttaaattcgggaggtggaggttgtagtgaattgagatcgtgttatcgtattttagtttgggtaataagagcgaaattcggttttaaaaaaaaaaaaaattagtaaaattatattttaattgtatattttgattatagtattttagttgagttggagtgagggtttgttttggagaaggtagtttattttttttttttgtttcggtacggggttatgatttattgtagggtgagaggagtggagagtggtgtatattagtagtttagttattagtggatagagtagtatttggagttagttttttatgttttatatatagtgagaaaaattattgtgatatgatgtttaattttgatttaagttgtataaaaggtagttttaggttaggttttaatttgttagaggtatataggtagttttttggtgggtttttgtatttgtttgtgttgtttggagatttggtttaaagattttttttttttttgagacgaagttttattttgtcgtttaggttgtagtgtagtggttggattttggtttattgtaagttttgttttttgggtttaagcgatttttttgttttagattttcgagtagttgggattataggcgcgtgttataataatattcggttaatttttgtatttttagtagagatgggattttattatattggttaggttggttttgaatttttgattttaagtgattcgtttgtttttattttttaaagtgttgggattataggcgtgaattatcgtattcgatttagagatttttaattcgattatttattttttattttatttagggattggatttttgtcggaagggtggagtgtgggatagggtagttagggttttgaatcgattttttttttttagatttttttggttttattgtattagttttattttttgttgacgttagataggttttagttagaatgcgagtgttatagatatagttaagtttagcgttgattaatattttgttttagaagaatttttataaggttttttgtagaatgattttgtgtttagtttaggagagttagggttttttttgatttcgttttggagtttttttaagtatttaaattatttgatggggataaatggagaggatagatgagggagtagggtggagcgttttagtagaatgttttttatttagaattcgttgttattttgtagttagtaaggatgtggggttaagaattaaggttagggttttataggaaaaaggtaaagggggaggggtgggaatttaagtttatttttttttttaagtatttaaaggttttttggatggagaagagtattggagtaaaaattttagtataaattttattggggatagtgggtaattttgtcgggttagtaaaaataaatggtgtgggttttggaaaatgagggttggaggttgtgaataaagtagtggatgtgtttgtttagtatattaacgggaagaagtatttagatgggaggagtattaggggtaggagaaatgttagatagattttagtgttagggtaagaaggaagattattttgtttgtagaatagggagggtatagggatggtgttaatttgtttttgtgatggttttgagtttttatttaataatgagaaagtttgtttttttttttttttttggatgatttaggagttttgggttgggatgtagtgattttatttttagtttttttttttttggtgatgaatttttttatttttatttagaaaatagatttggattagaggtattgtatagtttttttaggattttaaaggaggaagagtttttttttttgtttttaaagttgtttgttggaagaggattttaatagttattttagtcggatgtatagtaggattatggaattttttttttgtattatagggatttattttttattttattattgtttataaaaattgatggttttttttttgagatagagtttcgttttgttttttaggttggagtgtagtggtgcgattttggtttattgtaatttttgttttttgggtttaagtaattttttgttttagttttttaagtagttgggattataggtgtttgttattataattggttaattttttgtatttttagtcgagacggggttttattattttggttaggttggttttgaatttttgattttatgatttatttatttcggttttttaaagtgttgggattaaaggtgtgagttattgtatttggtttaaaattgatgtttttttttttttttttaatatataatttgggattttttagttttttattttttttttttttttttttttttttttgagatagagttttgtttttttatttaggttggaatgtagtggtttagtttcgatttattgtaatttttgttttttgggtttaagtgatatttttgttttagtttttttagtagttgggattataggtatatattattatggttagataatttttttgtatttttagtatagacggggttttgttatgttggtttggtaggtttcgaatttttggttttaagtgatttgtttgttttggttttttaaaatgttgagattataggtatgagttattaagtttagtttttttttttttttttgagatagagttttattttgttatttaggttggagtgtagtggtacgattttggtttattgtaatttttgtttttcggttgaagtgatttagttttttaagtagttgggattatagttatatattattatgttcggttaatttttgtatgtttagtagagatagggttttattatgttggttaggttgatttcgaatttttgattgtaaatgatttatttgttttggttttttaaagtattggtattagaggtgtgagttatcgtatttggtttttttttttatttttgagatagagttttattttgttatttaggttggagtgtagtggtacgattttggtttattgtaatttttgttttttaggtttaagtgatttttttgttttatttttttaagtagttgggattataggtgtgtattttcgtggttagtttttttttttaattggttagtgttttgtggtttttttatttttttatagtggaaaatggtttaggattgattgatatgaagataagtttaggggtttatatttaatttaatttttgtatttaagttttgggttaagattttggcgtgttgagtattatttattttgtaaggaattttgtaaaattttatttgaagtattatttataattttattttttttatttaaataaggattttcgttttatttttgttaggtatattgagttttatagtttttgttttttttttttggtgtttaggtttggttttttgagtttggtggttatattaatggtatttggtatatagtttttcgataatggggatatttaggaggtttcgagatattttatagttttgggttagtaatttggatttttttttttatttttttaggtattttataatttagttttttttttttttgtgggtaaagtgtttttgaatgtttatggtttaaaataagattttttttttatttatttttaaatttttttttagatttattttagaggaagggaatagaattttttatattttagtagttggtgataggttagaatagggaagaggtgagggtttagttggttttatataggagtgtagatggaggagtaggatttttttttgttttttaagtttttttaaatatattttttaatttttggcgaggatttttttttttttatatttttttttagtttttttaaggagggagtaggagtattcgaacgcggaaatcgaggtgttagtttaaattgttcggtcggttttagttatagttggataatgttcggtttaggtttattataagttatatagttgtttttttcgtgtttaatttgtttgtgatagaaattaagggggtttcggtatttagtatttaggcggtggaatcggggttttacgtacggtttcgcgggtaggttttcggttaggattcgcggggagttacgtagttaggagggtggggttgtttatcgatttaggacgcggtaacggatcggggagggcggagttttagcgatcgttttttttttcgttcgtcggtattttttggtttttatttggtttcggcgcggtttgcgagttagcgaggttcgcgcggtgaagtattgttcgagtttcgagttcgagtttttttggttgtagtagttattgttcgtcgtgttgttttaggttatttcgaaagaaggcgttttcgtttcgtttatagtcgtattcgttcgttttttagttttgcgcgttcgtagtcgttaattatcgtttcggtcgcgtgcgtgcgtgtacgcgtgttagtgtgcgcgtgcgttcgggttagagtcgcgtcgtaatcgttaagattgaaacgtagatcgtcgggatttagtttttgttttattggggtaggaacgtcggggcggggatacgtacgtttcgtttttaggaatgattttatcgtttcggagttttatttatagattttatttattatagggaacgggggcgggtgttagcgttcgggtaagcgtataagagtggtttttggtcggaggcgagggcgggaaggtgcgggaagtgcgcgtgcgcggagtttgggttagtttgggttcgggttcgtttgtagcgggtggagtatttgcggagtcggtaatttaggttttttttttagttttcgcgtagaattagtttttttgtgtcgtcgggaaatcggtaattagaacgttttttgcgcgcggtatttaggtagttttcgagaatgtttgtattgtggtttgtttattttcgttttttttatacgttttcggtttcgcgtttattacgttcgtgtttcgttttatcgcgggtttttagtttaggtttcggggttcgtaatagtttaggtagacgagcgcgcggtagcggtagtggtaggtgaatttgtaatttgtagagaggtttggcggtgaggcggaggagttttaggtcggggaaatgtttcggagattgaagggaagttttagggagagggtcgttgttcgttaggtttcgtaggttcgatttattttagtgggttattttatattgttacgcggattttaatgttggttatttgggcgtttggaaatcggtcggaaggttataggtagagaggtttgtttaatagttggatttttatcgtttagtatagaattttttttttttttattggtaattaaaaaaataataataaaaaattgcgttttgtttttgttatttaggttggagtgtaatggcgcgatttcggtttatcgtaattttcgttttttgggtttaagcgatttttttgttttagttttttgagtatttaggattataggcgttcgttattatgtttagttaatttttgtatttttagtagagacggggttttattatgttagttaggttggttttaaatttttgattttaggtgatttattcgtttcggttttttaaagtgttgggattataggtttgagttatcgtattcggttttttattgggaacgtatatggaatatatttgtttatttatttgaaggaaaaattaaatatttttaatttacgtttgttttgtggttgttatttgtttttattttttttagattaagatattggtttttatatattttaatttttcgtttttatttttttttttatttattttagttaggtttgtttttttttttaggaaattgttcgggatagggtttttagcgatttgtgtattattaaatggaatttagtgttttattttttatttttatttttttagtattatttgaagtttgttttttttgatttttaggggttatatttttttagttttttttttattttttgtagtttttgtttagtttttttgtagattttgatttaatttttatattttacgatgaagtttgggtttagttttgattattggtttggtttgtttatatttatttgttttagatttacggttgaaatattgatttaaatttttagattagatttttcgtgttagtatttttattaggatgtttaaaagacgttttaagtgaatatggttaaaatttaatttttttttttttagttttattgttatatttgtttagttttttttttgtagtaaaaatggttattaggtttttagttattggagataaaagtttaaatttatttttgattttttttttgtttttatttttgataaatatgtttaaattattttgttttttatttttatggttattttatttttttttgagaacgttgtaatgttttagttttgttttttttttttttttttttttttttgagatagagttttattttgtcgttaaggttggagggtagtggtacgatttcggtttattgtaattttcgttttttgtgtttaagtaatttttttattttagtttttcgagtagttgggattataggtattcgttattacgtttggtttatttttttttattttttagtagatatgaggttttattatgttggttaggttggttttgaatttttgattttaggtgatttattcgttttcgtttttcgaagtgttgggattataggtatgagttatcgcgttcggttttttgtttattttttgtattttgttataattttgtgttttttttagttgaatttgtgatgtttttttgtatcggatgagagggtttttatgtatatatagatttgggatattatttatttataagtttttaaataggttagagtagtgatgtttaatttagattttatgttataataatttggggagtttttaaaatttattgatgtttagggtttatttttagtagttgatttaataggtttgcggtgggatttaggttagcggggaggattgtaaaagtatttttggtgattttagttggtgtttatttaggggagagtaatttttgtttgttggcgatttttaggggtgtagaaggattgttgggtgtgtggttgcgtgtatattttagtatttgatttattgggttagaaaagggtgtttgttaaataaagatttaataaaatttttgtttgtagggggtttattaaaggttttaaatttttttaggtttttttttataggtggtaatttttttttattttaaaggttttggagggggttatgagtgtttgagaagaggtaagtttgggaagatggatttcgaggatagtaggtataaatttttttttaagaagggttaaggtattttaaagataagaaatttaaaattagcgtatttttatatataagtagttatttttgtttatttgtggtttagatacgagtggagtgcgataagggataaattattttcgcgtattttttagcgatggggcgaaagtaacggatttagttttcgggagttgttttcgtcgattttttttgtcgcgatttgattcgcggcgattgcgttgttttttggttgtttttttcgttttcgtaggcgcgcggggttattatttacgcgcgtattgtaggtttttgcgtacgacgttttagatgaagtcgttatagaggtcgtattacgtgtgcgtggcgggtttcgcgggttggaagcggtggttacggttagggattagttgtcgtgtggggttgtacgcggtgtttcgcgcgatgcgtagcgcgttggtacgttttagtcgggtgcggttttttttagcgcgtttagcgggtgttagttttcgtagtttaatgagtttaggttttttcgatatggttcggttgggttcgtgtttcgttggttttgggcgttagtaagcgcgggtcgggcggggttatagggcgggtttcgattttagcgttttttttaggatttagattgggcggcgggaaggagttgaggagagtcgcgtaatggaaatttgggtgtagggattgtggggttcgaaggcggggttgggcgcgttttcgtagagtttttttcgttttgtttttttttttttttttcgttttttttttatattttatttcggacggttataacgacggcgatcgtaaagtattacgcggagatattcgtgtttttggaggttagttttattgtgttagaggaagagggtttttatattcggttttggtttttttggttcggtttgttgaagtaatatatttggtttatttattgggtggggtaggaagtttcgagtttttatttggggtgaggaggagggagatcggttagtagttttatcgttcgttttgttttttattgcggagattggggtttcggtagaggttggatcgtgattttgaggtttaggggtgtattttgggtggatttttttggtatgggtggtcggtttttagtaattgtagtttttatttggttttgttattttgggttgttaggatataagtttttttatgttttttttagtgtttgatttggtattttttgtaggtaggtgggtattgaggatggtaatgtatgtgggggatgtgggagtagggtttagaggtttaaggttttaggatatttttatttgtagtaatattatttattttggtatcgtgagtagcgtttagaagtttttgtattgtagtaagtatagcggggtcgttttggagttattgtttttagtatatttagtttgtaggttttagtttatttgggggaaagttaggaaggtttgattggttttggaaggtgggggtattttatttatatttatgttttttgtattttttttattttttttgttatttttataggttttattttcgcgtttgtagtcgtaggttttgttttgaggggttgaatatatgttggagttggtgtttggtaattgtttgttatttgtttttgttttttcgttttagtcgtttttagatttttgggatttaggagagagaagtggagagtggtaggaaggtgttggtaaagtgggatagtggttttgagtagttaattttttagtgtttatttgttttaatattaggttttttttaggaggttgggttttagttagggttagatgggttaggaaattttgtaagtgggttaggttgggtagttggtttagtagtgtgtttgtgaggaaggttcgaagttgtaagggtgtttagtggaggttagtgtgatgtaggtgttggttagggggttaaggaaaaggaaggggttgggttgggttgagaatgtttgtgggggtttatgttttattagttggtgtgttatttgaggtttaaggattgaaaagagtattggggttgaggtgggtgggtaaagataaatagtagggacgtagtcggggtaggatggggagggcggtattggggttgtgggggtt

SEQ ID NO: 192 - DNA, 2932 bp, Artificial Sequence
  chemically treated genomic DNA (Homo sapiens)
gttaagaataaaatatattaagataaggaaaatttgtagttaagaatagaaaaaaattatggttttgaagtatgagttatttaaagaaagtggaaatatttttagattatgtagtaaaaaataaagtgattttttttttttaaatttatgtaataaattgataggtaatatgtgaaagttatagaatgtagattagaggatataataaatttattttttttatgtttataagaagtaagaaaagttttgatgtgagttagtattgttttataattttgaattgtgtagattgtatgtatttttttttagtttgaagtaaatagtggataggaaaaaatattaaatgttggtagtaaatatggaaggaaattataattaatgtaatatgttaaaatatgttatgtttattttattaatttgaattaaaatgtaagaatttaaaatgttttggaaaaatatgggtattgatttgatgtttgaagttttaaaatattatatattttgaaatagtatttgtattttgaaatatttgtttttatatattttttaaaatttttttttttttttattttatttattattaaataaaggatgaatagatgtaatttagaaattgttaagtatgttgaagaaagattattgtagaaaaattttttttagtttttttaaaggtgttaggaagtagaaaggtgatatagaattggagaggttggagtttttgtattaattgtattaaatgtgaattttgagaaaattttttttaattatgttttgtagttatatggatatgaagatttatgtgaattttgaaagatgtgtttatataagttgaaatgtttttaatgatttagttgatgtgtgtttttttatttgttttttttagagaggtgtaatggaagttagaatattttttttggaaatttaatttgttttgtagttttttgaggaattagtatttagttaatttgggttgggagtagttatttgtggtgaggttgattggttgggtaggaatagtgttggggtgtgggttgagtatagttgttttgttttttttgttataggaagtttgagtttatttgagtagtggtttttttaagtttaaagaagtagaggttgttgtttgttttttttaggtttttttattaaagttggagtatttttttttaaaattttatgttttggtggttgttttaaggagtgtgaggtaggggtatgtaaagttgggagttattatgggatagtttttaagtgttaggtttttagattttttgaatttggtttttatgggagaagggttttttgaggtgtggatagtgtgaagttttttggtaagtttatggggattaagtggggttagatttagatttaggagtttttggagtagtgtttaaattgtagtggtattggattatgttgtttggagtgtgtatagtttgtgtggtgtggggatttgttttttgagtttgtgggtggtgggtgggaggaagtattgtttgtggtgattggaattgggagggagaattgtattggtggtgggtaaagtttagaatgtgttgttagatttttaattttgtttttgtggagatgttggagattttgtgtataggaaagtttttgtagtgtttattgtggttagagtagttggggtattaatggtgggtgtttttttttattgttttttggttttgatgggggattagaggttagttttatttttagtgtgtttgaggtttatgtatttggttaatgagttgtggtttttttttaggttgggatggattttgaaggggattgtaatggaggagtaaagaagaagaatttttttaaattgaataataaaaggtaattagtttgttttatttttatagtttatatagttgtgagatttgagtaatttatttttagtttttagttttgaaataaatgatatgttgttgtttttaattatttttaagaaatgtaagttagtttttggaattaatatttttgtttagagtagaagtttgttggttgagtggagtatagtatatgtattttttttgttttttttgtttttttttttaatgatatataatattttatatatttatgaaatggggtatatggaagtgttttttatatgtttggaatgtgtaatgattaagtttgggtatttgaaggatatattattttaggtatattttatttttatgtgttgataatattttaagttttttagttattttgaaatatataatatattgttaattgtagttatttttgtttgttattgaatattggaatttatttgttttatttaattgtttttagttatttattaatttttttttattttatttttttattttttttggttttttttttttagttttggtgtgttttttttttagtttttttgttttagataggtggatgtttatatgtgtttttgttttatgaatttttgttttttaagtggtgttggttgtttatatgtgagttatatgttgttggtgatttgttttgtggtttaggtttttgtttttggtaaatggttatgtaaatattgtgtttgtggtttggttgatgagatagaaggttaaaagtatatttaggttgttaattggtaataaatatttgtatataatattggtaatgtaattatatagggaaaataattatttaaagtaaattttgattatggtgttttgtttttatagaatatttaaaattttattaaatagatttattgttagtagtaaattgtaaaatagattagtaagtttaataatattagaaattgtaatgtaaattataagataaattagttaaatatattaatattataagaaattaagttttttagtgtaagagaaaaaatataaatgtggaaattaaatatatttttaaaaataatgttaagtttgaattagaaattttaatatgaatt

SEQ ID NO: 193 - DNA, 2932 bp, Artificial Sequence
  chemically treated genomic DNA (Homo sapiens)
aatttatattgaaatttttaatttaaatttaatattatttttaaaaatgtatttgatttttatatttgtatttttttttttatattgaaaagtttggttttttataatattaatgtgtttagttaatttattttataatttatattatagtttttaatattattaaatttattagtttattttataatttattattaataatgaatttatttagtgaagttttaaatattttataaaggtagagtattatgattaaaatttattttaaataattattttttttatatgattatattattaatattatatatagatatttattgttagttaataatttaaatgtatttttgattttttgttttattagttaggttataaatgtgatgtttatatagttatttattggaagtaagagtttggattatagagtagattattagtagtatatggtttatgtgtgggtgattaatattatttgaaaagtagaagtttataagatagaaatatatatgagtatttgtttgtttggggtaggaaagttgagaaagaggtatattaagattaagggaaagaggttgggaagggtaaaaaggtgaaatgaaaagaggttggtgaatgattaagaatggttggataggataaataagttttaatgtttgatagtagatgagggtgattatagttagtaatatattgtatattttaaagtagttagaagatttaaaatgttattaatatatagaaatgaaatatatttaaggtgatgtattttttaaatatttggatttgattattatatattttgggtatgtaaaaaatgtttttatgtattttattttataaatatgtaaaatattatgtattattaaaagaaagaataaaaaagatagggaaaatgtatatgttgtgttttatttagttaataaatttttgttttaagtagggatattgattttaaaggttagtttgtgttttttaaaaataattaaaaataataatatgttatttattttagagttggaggttagaaataaattatttaaattttgtaattatgtaaattatgaaaatgaaataagttagttattttttattgtttagtttaaaaaagttttttttttttgtttttttattgtggttttttttaagatttattttgatttgaagagaaattgtagtttattagttaaatgtatgagttttaggtgtgttggaggtgagattaatttttagttttttgttgaagttagagagtagtaagagggagtgtttgttgttgatgttttagttgttttggttgtgatgggtattgtaggggtttttttgtgtgtggggtttttagtatttttatgaaggtagagttgggggtttggtagtgtgttttggattttgtttgttgttagtgtgatttttttttttggttttagttgttgtggatgatgtttttttttatttattgtttgtgggtttagagagtaggtttttgtattgtgtgggttgtgtgtgttttgggtaatatggtttagtgttattatggtttgggtgttgttttaggagtttttgagtttagatttaattttatttggtttttatggatttgttagaggattttatattatttatgttttaagaagttttttttttgtgaagattaagtttaggaaatttgaaagtttgatatttgggaattgttttatagtagtttttagttttgtgtgtttttattttgtgttttttggaatggttattaagatgtgaaattttggaagaagatattttgattttagtggaaagatttaaaggaaatgaatagtggtttttgtttttttgagtttggaagagttgttatttgaatgagtttaggttttttgtggtaaagagagtgaagtggttgtgtttagtttatgttttggtgttgtttttgtttagttaattagttttattatagatgattgtttttggtttggattgattgaatgttgattttttgagaaattgtgaaataggttgaatttttaggaggaatgttttggtttttgttgtatttttttagaaagggtaagtagagaaatgtgtattagttgaattattggggatattttaatttatgtagatatgttttttaaagtttatataagtttttatatttatataattataggatgtagttaagggaaatttttttgggatttgtatttaatatagttaatataaaaattttgatttttttaattttgtattatttttttgttttttaatatttttgaaaaggttaggagaaatttttttgtagtggtttttttttagtatgtttgatagtttttgagttatatttgtttattttttatttgatgataaatggaatgaaagaaaaaggaagttttaaaaaatatatagagataggtattttaaggtataaatgttattttaaagtgtgtaatattttaaaattttagatgttagattaatgtttgtgtttttttagggtattttaaatttttatattttaatttaaattagtaaaataaatatagtatgttttagtatattatattagttgtaatttttttttatatttattgttaatatttaatatttttttttgtttattatttattttaaattgaggaaaagtatgtgtaatttgtataatttaaaattgtaaagtaatgttaatttatattagagttttttttattttttatgaatatagaggaaataggtttgttgtattttttagtttatattttatgatttttatatattatttattagtttattgtataagtttagaagaagaaaattattttgttttttattgtatagtttgaggatgtttttattttttttaaataatttatattttaaagttataatttttttttatttttgattataaattttttttattttgatatattttgtttttggt

SEQ ID NO: 194 - DNA, 7432 bp, Artificial Sequence
  chemically treated genomic DNA (Homo sapiens)
atttgaagttagagttatttagaggagaaagagttggaattgagaatttaaggaatgtttggaagtgattgggtttgagtttatttaggaagaaatagaggttggagatatgagattgtgttgttatttttttttattaatttttgggttttattgaggttttattataagtttggttttgtagtttagtgattaggagaaattagatataagataataataatagtaatgattttttttttttttttgagatggagttttgtttttttgtttaggttggattgtagtggtgtgattttggtttaatgtaagttttattttttaggtttatgttatttttttgttttagttttttgagtagttaggattataggtgtttgttattatgtttggttaattttttatatttttagtagagatggggttttattgtgttagttaagatggttttaattttttgattttgtgatttgtttgttttggttttttaaagtgttggggttataggtatgagttattgtgtttggttaatagtaatgatttttgagtatttatattgttagtttttatggtaagagttttttttattttttgttttgttttgttttaagatagagttttgttttgttatttaggttggagtgtagtggtgtgattgtggtttattgtagtttttattttttgggtttaagttatttttttgttttagttttttaagtagttgggattataggtatgtattattatttttggttaatttttgtatttttagtagggatagggttttttattatgttggttaggttggttttaaatttttggttttatatgatttgtttattttggttttttaaagtgttgggattataggtgtgagttattgtgtttttttttgtatttgtttaagtaatatattgaaatatgtattgtgttttttattttatggaggaggaaattgaggttagtaaatgaggttgttatgggaggtggagataggatttgaatttgttttagtgtaggaggtttaagagtttttgtttttttttagggtattgtgtgggagggtgagaaggagggaggtttatagaggtatgatttttgattgttattgttatttgggttttgttttttgaagtttttgttaagtggggaggtggttgggggagggttttgttttgtgtagtttttttttttttggtttgtagagttgagtatagagggatagaggtatggaatttttagaaatgtttttttttagaaataggttttaggttttgtttgttttgtgtttttgtgtgttggttttggtttgtattgggggtgagaagaagtgggtggagggatgtggggtttatatttggtgggtgtgagtgtggttgtgtgttttgtggttttgtagttatgtgagatatgagtatggagtgtgtgtgttttatggtgtgtgtatgtatgtgtgtgttggggagtgtgtgtgttggtggttgagagtgaagtgtgaatgttatattggtataaattgggattatttgtgtgtgtgtatgtgtgtgtgtggaagtgggagtatgtagttgtggtaaaaaagtgtatgtttgtgtgtatatgtgtatttgtgtgtatttgtttttttgtggggtatgtgtgtgtaaaatatttgagtgtgtggatatgtgtgagggggtgagtgtgtgttggtgtgtatgtttgtgttttgtatatgtatttttttttttttttttgagatggagttttattttgttatttaggttggagtgtagtggtagtagtggtgtgattttggtttattgtattatttgtttatttgttttaagggatttttttgttttagtttttagagtatttgggattatagatatatgttattatgtttggttattttttttttttgagatggagttttgttttgttatttaggttggagtgtagtggtgtgattttggtttattgtaatgtttgttttttgggtttatgttatttttttgttttagttttttgagtagttgggattataggagtttattattatgtttggttaattttttgtatttttattagagatggggttttgttgtgttagttaggatggtttttatattttgattttgtgatttgtttgttttggttttttaaagtgttaggattataggtgtgagttattgtgtttggttaatgtttggttaatttttttatatttttggtagagatagggttttgttatgttgtttaggttggttttgaaattttgattttaggtgatttgtttgttttggttttttaaagtgttgggattataggtatgagttattatgtttggttatgtattttatgttaaaatgggattatattttagattagtattatttagtagaaatttaaatttttaatatagggttaggtatggtggtttatgtttgtaattttagtatttttggaggttgaggtgggtggattgtaaggttaggagatttgagattattttggttaatagatgggtaaaaatttatttttattaaaaatataaaaaattagttatgtatggtggtatgtgtttgtagttttagttatttgggaggttgaggttggagaattatttgaatttgggaggtagaggttgtagtgagttgagattgtgttattgtattttaatttgggtgatagagtgagattttgtttgaaaaaaaaaaaaaatttaatatgtatgtagataatgtgtaaggtattattttatgtgtattgtatgtagtaatttttaatttttatgataattttgaggtagatattattattttgttttataaaaggagaaatagttttggggagataggataagttattggttaaggtatatagttagttatatgtggtttttgtgtgatggttggtttttgtaggtgaggttttgtttagatgtgtgggtagaaggtttggtttggaaagaggaattgatagtaaggttaagttaatgtttgtttttgggggtagaaagttattttttgttttttttttattgtttatagaggtagtttagatagggtgggggttataggagaatgaagggagaagggggtagtttttgggtagtaaaattaggtggtgaagggaggtattagaggatggtaattagagaggttattagaggggaattataggtagatagggtgataggagggattattgatataaggtgaagagatggtttagttggatggggtggtttatatttgtaattttagtattttgggagtttgaggtgggtggattatttgaggttaggagtttgaggttttaatatggtaaaattttattttttttaaaaatataaaaattagttgggtatgatggtagatgtttgtaatttttgttatttgggaggttgaggtaggaaaattgtttgaatttaggaggtggaggttgtaatgagatgagattatgatattgtattttattttgggtaatagagtaagagattgattttgttttataaaaaaaaagaaaaaagaaaaaaaaaaagagatggttgatggttaaagaggggttagtggttaggggatatataagggtaaaggtaggaggtaagaggattggtagggggttgtttttgggttattgggagtgatataggatgagtatggagggaaagggagaaggggattttagggttttagtttatttaagttgttttttggttttatttagtatgttagttagaggtttaggaaggaattttgagttttttattaaagttaaagatgagttgttggagtttggtgaggggtaggatgaaggagttgttggagatagtggtgaataggattagagatgggtggtaatggttttggtgagggtgtgttgggttgggtggtgggaggggatttttgggtttgagggaggaggggttggggtttggatttttgagttttagggaggaggaaagggtgggagtggggttgtgatttttaggtttgggaggagtggagggttagagttgagagtaggaatttttaggttatagagaggagtggataaatggggtagagaatatttggggagagttggggtttttattgtgatgtttttttttttgtaggagtttgagtattttttggggttttatgtagatttattatgatgattatttgagggatttgggtttgtttattaaggtttggttttttgaatttaaagatagttttttgaagaagatttatagtttgtgttttaggtttgtttgtggggataaggattagggttaaaatgtttataaaagttaggtgtggttgtggtgggtgtttgtagttttagttatttaggaggttgaggtaggatgatggtttgagtttaggagtttgagattagtttgggtaatatagtgagattttttgggggtaaaataaaaagaaaaaaaaaagtttatatttttttaataaataaagttttatttgtgtttttgtttggatttttttttagtgtggttagaaaaaaatttattttattgttttttaggaattaatgagtagaagaggtgatatttgatggggaaggaagagtagggaggttgggaagggtattaaggaataatattttattgtgggtttgtggagaatgggggattttaaggtgtgttagttttaggagggtgagggtaggagtgtgggtggagttagtaggtttttatgatggtttttattgagagttttgtttttgttttttataagttttgattttatttttagtgggtatttagtatttttaatttttttatagtttttaatttagtttttgttggaggtgaatttttagagtgagggttttttgttatttgagagaaggttttttgtgatgtgattttgggggatgttattgttttttttgtttttatttattttttttgtagttttgttggttaggattttggtttagataaaggatgggggttgtggttgtggagtggaagtgggttttaattattataaattttttttgtgtttgtttggagttggtgaggatagtttgttagagtttggtaagaaagggatttagggtgtggggataggggggtgttagtagggagagggtaaagattgataaagtaggaattttaagaggtataatattagaagtttgtgttggaattatgattgtgtgtgtgtgtgtgtgtgtgtgtgtgtgtgtgtgtgtgtgtgagagagagagagagggagatggagttttgttatgtagtttaggttagatttaaatttttgggtttaagtaatttttttgttttagtttttttagtagttgggattataggtgtattattatattttataaattatagaatttagaattgtagattatttgagtttttgtttagagttagggtggttgaggtggggaggattttttgagtttaggagtttgaggatgtagtgagttgtgattttgttattgtgttttagtttgggtgatagagaaattttatttttaaaaaagagaaagaaaaagggataggtataatggtttatgtttgtaattttagtattttgggaggttgaggtgggtggattatttgaggttaggagtttgatattagttttattagtatggtgaaattgtatttatattaaaaatataaaaattggttgggtgtggtagtatatgtttgtaattttagttattttagaggttgagataggagaattgtttgaatttaggaagtggaggttgtagtgagtttagattgtgttattgtattttagtttgggtgatagagtaagatttagttttggtggaaaaaaagaatgaaaaaatttaaaaaattaaaaaagaattgtaggttgggtgtggtggtttatatttgtaatttaaatgttttgggaggttaaggtaaatggattatttgatgttaggagttggagattagtttggttaatatggtgaaattttgtttttattaaaaatataaaaattagataggtatggtggtgtatgtttgtatttttagttatttaggaggttgaggtaggagaattgtttgaatttggaagatagaggttgtggtgagttaaaattgtgttattgtattttagtttgggtgagagaataagattttgttttggaaaaaaaaaaagaattgtagattatttgtttgtgttttttttttggggattagattttattttttttttgttgtatttttttattttttatgtgtggatgatgatattgtgttttgtgtatgttttttgttattaaaagtgttttttttatagagtaggtgagaatttagtgaggagatgtagggatatgaggtttgatttagggtagagttttaaggtaatatatttgatttattgtaggtttttaatggtgtttgtagagtatttttttgtattgatttagttttagtaaagggtagaggttttgttgtgttttttgttgggtttagaattgtttaggtgtttaagaaagttttttaggttgggtttagtggtttatatttgtatttttagtattttggggaggttgagatgggaggattgtttgagtttaggagttttagattagtttgggtaataaaataagttttttatttttataaaagaataaaaattagtagttgggtatggtggtttatgtttgtaattttagtattttgggaggttaaggtaggtaaattatttgaggttaggagtttaagattagtttggttaatatggtgaaattttatttttattaaaaatataaaaattaggtggggtatagtggtttaagtttgtaattttagtattttgggaggttaaggtgggtggattatgaggttagaagtttgagattagtttggttagtatggtgaaattttatttttattaaaaatataaaatattagttgggtatggtggtaggtgtttgtgattttagttttttgggaggttgaggtagaagaattgttagaattttggaggtagaggttgtagtgagttgagaatatgttattgtattttagtttgggtgatagagtgagattttattttaaaaaatatgaaaataaaaattagttgggtggtggtgggtgtttgtaattttagttattggggaggttgaggtaggagaattgtttgaatttgggaggtgggggttgtagtgagttaagattgtattattgtattttagtttgggtaatagagtgagattttattttaaaaaagaaaaaaataataattaaaatgttaaaattaggagtagaattatagaatgttggaaagtgaggtttaagaagggggttgtgtttaagtttatgtatgggaaatttgattgggatattgagtttatatagagtaggattttagttttttttattagagtggggtgtgattataggaatagttgtttttagttagtttgttatatgatatttttttaatgttttagg

SEQ ID NO: 195 - DNA, 7432 bp, Artificial Sequence
  chemically treated genomic DNA (Homo sapiens)
tttggaatattgagggggtgttatgtggtaggttgattggaggtggttgtttttgtggttatgttttattttggtgggggggattgagattttgttttgtgtgagtttggtgttttagttaagttttttatgtatggatttggatatagttttttttttgggttttattttttaatattttgtgattttatttttgattttaatattttaattattattttttttttttttgagatggaattttattttgttgtttaggttggagtgtagtggtgtaattttggtttattgtaatttttattttttaggtttaagtaatttttttgttttagtttttttagtagttgggattataggtatttgttattatttggttgatttttgtttttgtattttttgagatggagttttgttttgttatttaggttggagtgtagtggtgtgtttttggtttattgtaatttttgtttttagggttttagtaatttttttgttttagttttttaaggagttggaattataagtatttgttattatgtttggttaatattttgtatttttagtagagatggggttttattatgttggttaggttggttttgaatttttgattttgtgatttgtttattttggttttttaaagtgttaggattataggtttgagttattgtgttttatttgatttttgtatttttagtagagatggggttttattatgttggttaggttggttttgaatttttaattttaagtgatttgtttgttttggttttttaaagtgttggaattataggtatgagttattatgtttagttgttaatttttatttttttgtagagatgggagatttgttttgttgtttaggttggtttggaatttttgggtttaagtgatttttttattttggtttttttagggtgttgggagtataggtgtgagttattgagtttagtttagaaggtttttttgagtatttaaatagttttgggtttagtagggaatatagtaaagtttttgttttttgttaaggttgagttagtgtagggaggtgttttgtagatattattaaggatttatagtagattaaatgtgttattttagggttttgttttaagttagattttatgtttttgtatttttttattgagtttttatttgttttatgagagaggtatttttggtgatgaagaatatgtatagggtataatattattatttatatgtaggagatgaggaagtatggtagaaagagggtgagatttgatttttggagaaagaatataagtaaatggtttataattttttttttttttttaagataaggttttgtttttttgtttaggttggagtgtgatggtgtaattttggtttattgtaatttttgttttttgggtttgagtgatttttttgttttagttttttgagtaattggaaatataagtatgtattattatgtttgtttaatttttgtatttttagtagagatggggttttattatgttggttaggttggtttttaatttttgatattaagtgatttgtttgttttggttttttaaagtgtttggattataagtgtaagttattatgtttagtttatagtttttttttagttttttaaatttttttattttttttttttgttaagattgagttttgttttgttatttaggttagagtatagtggtatgatttgggtttattgtaatttttgttttttgggtttaagtaatttttttgttttagtttttggaatagttgggattataggtatatgttattatatttggttaatttttgtatttttagtatagatgtggttttattatgttggtaaggttggtgttgaatttttgattttaagtgatttatttgttttggttttttagagtgttgggattataggtatgagttattgtatttattttttttttttttttttttttagaaatggggtttttttgttatttaggttggaatatggtggtaagattatagtttattgtatttttaaatttttgggtttaagggattttttttattttagttattttaattttaagtagaagtttaaatagtttatagttttaaattttgtgatttgtggagtgtggtggtgtatttgtagttttagttattggggaggttgaggtaggaggattgtttgagtttaggagtttgagtttagtttgggttatatagtgagattttattttttttttttttttttttatatatatatatatatatatatatatatatatatatatatatagttatggttttaatatgggtttttaatattgtgttttttaaaatttttgttttattgatttttgttttttttttgttgatgtttttttgtttttgtattttgagttttttttttattagattttggtaggttgtttttattagttttggatgggtatagagaggatttatagtggttgagatttatttttgttttatagttataatttttattttttgtttaggttaaagttttggttaatagaattgtggagggggtgggtggggatagaaagggtaatgatgttttttaaggttatgttatagggaatttttttttaagtgatagggaatttttattttgagaatttgtttttgatagaggttgggttgggggttgtggaggggttggaggtgttgggtgtttattgggaatggagttagagtttgtaggagataagggtgaagtttttagtgagggttattatggggatttgttgattttatttatgtttttgtttttatttttttgaaattgatatgttttgaagttttttattttttgtaagtttataatagggtgttattttttgatattttttttgatttttttatttttttttttttattaggtgttattttttttatttattgatttttgggaggtagtggggtgggtttttttttggttatattggggaaggatttagatagggatataggtgagattttatttattggagaagtatgaatttttttttttttttttgttttatttttaagagattttgttgtgttgtttaggttggttttgaatttttgggtttaagttattattttattttagttttttgagtagttgggattataggtatttgttataattatatttggtttttatgaatattttaattttggtttttgtttttatagataagtttggggtataggttgtgggttttttttaagaggttgtttttggatttgaggaattaggttttggtgagtggatttaggttttttaggtggttgttatagtaggtttgtatgaagttttggaaggtgtttgggtttttataggagagaggatattatagtggaggttttagttttttttaggtgttttttgttttatttatttgtttttttttgtgatttaggagtttttgtttttagttttaattttttattttttttagatttaggggttatagttttatttttattttttttttttttttgagatttaggggtttaggttttagtttttttttttttagatttaggagtttttttttattatttagtttagtatatttttattagaattattgttatttgtttttggttttgtttattattgtttttagtagtttttttattttgttttttattaggttttagtgatttatttttagttttggtggggggtttagggtttttttttgggtttttggttggtatgttaggtggaattagagggtaatttgggtaggttgggattttagaatttttttttttttttttttttatgtttattttgtgttgtttttggtggtttaggggtagttttttgttagtttttttgttttttgtttttatttttatgtgttttttgattgttaatttttttttaattattagttattttttttttttttttttttttttttttttttatgagatagagttagttttttgttttgttgtttagggtggagtgtagtgttatgattttgttttattgtaatttttattttttggatttaggtaatttttttgttttagttttttgagtagtagggattataggtatttgttattatgtttggttaatttttgtatttttagaagagatggggttttgttatgttggggttttgaatttttgattttaagtgatttatttattttgggtttttaaaatgttgggattatagatgtgagttattttgtttggttgggttatttttttattttgtgttagtagttttttttgttattttgtttgtttgtggtttttttttaatggtttttttaattgttattttttgatgtttttttttattatttgattttgttgtttaggaattatttttttttttttttgtttttttgtgatttttattttgtttgagttatttttgtggatagtggagggagagtaggaggtgattttttgtttttaggggtagatattggtttagttttgttgttagtttttttttttgggttagattttttatttatgtatttggataaagttttgtttatagagattagttgttatgtgggggttatatgtagttagttgtgtgttttggttggtgatttattttgtttttttaggattgtttttttttttgtagaatggggtaataatatttattttagggttattgtgagaattaagagttattatatatgatgtatatggaatggtgttttgtatattgtttatatatgtgttaaatttttttttttttttagatggagttttgttttgttatttaggttggaatgtagtggtgtgattttggtttattgtaatttttgttttttgggtttaagtgattttttggttttagttttttgagtagttgggattataggtgtatgttattatgtatggttaattttttgtatttttagtagagatgggtttttatttatttgttagttaggatgattttaaattttttgattttgtgatttatttgttttggtttttgaaagtgttgggattataggtatgagttattgtgtttggttttgtattaaaaatttaaatttttattggataatgttgatttagaatatgattttattttaatataaagtatatggttgggtgtggtggtttatgtttgtaattttagtattttgggaggttaaggtgggtggattatttgaggttaggattttaagattagtttgggtaatatggtaaaattttgtttttattaaaaatataaaaaaattagttaggtattggttaggtgtagtggtttatgtttataattttagtattttggaaggttgaggtaggtggattatgaggttaggatatggagattattttggttaatatggtgaaattttgtttttagtaaaaatataaaaaattagttaggtgtggtggtgggtttttgtagttttagttatttgggaggttgaggtaggagaatggtgtgaatttgggaggtggatgttgtagtgagttaagattatgttattgtattttagtttgggtaatagagtgagattttgttttaaaaaaaaaaaatagttaggtatggtggtgtgtgtttgtagttttaaatattttgaagattgaggtaggagaattttttgaaatgggtaggtggatgatgtagtgagttaagattgtattattgttattattgtattttagtttgggtgatagagtgagattttgttttaaaaaaaaaaaaaaaaatgtatatgtaaaatatagatgtatatattagtatatatttatttttttatatatgtttatatatttaaatattttgtatatatatattttatagagagataggtgtatataaatatatatatgtatatagatatgtatttttttattatgattgtatatttttatttttatgtatgtatgtgtatatatatagatgattttagtttgtattaatgtgatatttatattttatttttagttattgatatatatattttttgatatgtatatgtatatgtatgttatgaaatgtatatattttgtatttatgttttatgtggttatagagttataggatatatagttatatttatatttattaggtgtgggttttatatttttttatttatttttttttatttttaatgtaggttaggattagtatgtagaggtatagggtaggtagggtttggagtttgtttttgaggagggatatttttgggggttttgtgtttttgtttttttgtgtttaattttgtgggttgggggaggggaggttgtatagagtagggtttttttttggttatttttttgtttggtagagattttagagagtagggtttaggtgatagtggtaattagaggttatgtttttgtgggttttttttttttttatttttttatatagtgttttgagagaagatagaggtttttgagttttttgtattgaggtaggtttaaattttgtttttattttttatgatagttttatttgttggttttagtttttttttttataaagtgggaggtatagtatatattttagtatattatttgaataaatataaagaaaggtgtagtggtttatgtttgtaattttagtattttgggaggttgaggtgggtagattatatgaggttaggagtttgagattaatttggttaatatggtgaaaaattttgtttttattaaaaatataaaaattagttagaagtagtgatgtgtgtttgtaattttagttatttgggaggttgaggtaggagaatggtttgaatttgggaagtgaaggttgtagtgagttgtgattatattattgtattttagtttgggtgatagagtaagattttgttttgaaataaaataaaataaaaaatgaagaaagtttttattgtggagattggtaatataggtgtttaaagattattgttgttggttaggtgtggtggtttatgtttgtaattttaatattttgggaggttgaggtaggtggattatgaggttaggagattgagattattttggttaatatggtgaaattttatttttattaaaaatatgaaaaattagttaggtgtggtggtaggtgtttgtagttttagttatttgggaggttgaggtaggagaatggtgtgaatttgggaggtggagtttgtattgagttgagattgtgttattgtagtttagtttgggtgaaagagtaagattttgttttagaaaaaaaaaaaagattattgttgttattattattttgtgtttaattttttttagttattgggttgtagggttaggtttgtggtagggttttaatagggtttaagggttgatgagaggaaatagtaatatagttttatgtttttagtttttgtttttttttaggtgggtttgagtttgattatttttaagtattttttgagtttttaattttaatttttttttttttgggtgattttggttttagat

SEQ ID NO: 196 - DNA, 12423 bp, Artificial Sequence
  chemically treated genomic DNA (Homo sapiens)
tttatttgagttttttttgttgtagagaaagtttttttgtgattttatttttttttttaaatgttgggaaatgtttttgagttttgtttttgatatatatattttttttgggttgagggatggggattgggatatatgttttgggaagggtaggtgtagagtgatggggttgatggggtgggggaagtagggggaggagttgtttttttgaggtttttgggaattggttgtgttaggtatttttagttttttagttaagtaatatagagagttaaaagaggttattagagataagaaggtttttatggggttattgtttgtgggggatgttagtagtggggaggagtgaagtaggaaggaattgggagattggatggaattgttttttttatatggttatatatagttatatatggttattgggattagagttagttttgtttgggtagttaggtttttagtgtaagttattagtttatttggaggggattagtgttttggttaataaggttagttggtttttttttagttggagtttatttaattttgttaggaagttagagagttggataagtggagtttagtttggggaggtggaagagagggaggatggagtatggtgaagtataggtggtttttttggtagttttagttttggttttggaatagtttgggtagtgtgttaattttttttgttattgttgttttattgatttttatgaatgagttgtgaggtagttatttttagttttttatggataaatatttgaggtttagagagggtaagagatttgtttgtgattttttagtatttttgtttttttttggggttttgagggtataataaagatttttaaggttttttttttttgtaggaggtttaggtgtagttgtgggggagggtgtttttggtgttttttgtttttgtagttagtttgttttttatttggtagttttttttttttttttgggatgagatgtgtatgtgatgatgggattttgtaaatgggttgggaagaaggagttatttttttaaagggttagtttttttaggagtgtttgaatttttaaagggggtagggttttatataaattttatttagaagtaggattataagagtttttgtagtatttttttttttttgttggttttttttgagtgtgtattttgttttattagtggaatatttgtgggttagggttattggagatagggttatattgtttgggtggttatttaagtaattttattattttgagtattttttttttttatttgaaaggtggggggttatttatttagtttttagggttgttaaggtgattaaatgggataatggttgtattatttttgagtaaagggtattatagatgggaagattattttagttttgtagggagttagatgggttgtgagggaggggtaaaggtagggttggagggggttggaggggttggttgagtagggtatatatggggggggtttttttttaaatttagaaaaatttttagttaggtttagtgtttttgttgagaaattgaggtttaaagaaaggaattttttgtttttttgtttttttttttttgtttgaggttatttatttatttaataattttgtgtttgatattagataaggttttagtgagtaaaatgaatatagtttttttgggaatatagagtttagatagggagatgattattttattattgtaaatataaatatataattttagtttgggttaagtgttgtgaagttttagatttgtgtttggtttggtgttgtattttaagtattttggtatttaagtggtattgaaatatttgttggaaagaaggttattttgaggaggtgatgttagagttgaggtttggagggttggagttaaataaagatggttttaggttttttttgttttttttgtaggttttgtttttgttttttttttggtatttaggttaagggtaagtatttttgattggttattagttttaatatgttgagtatagggattagattttgttttgtgtggttggttttttttaggttttgaatttagggaagtgtatgtggattttaatttatttagatggtgtgtttgtgtttgttttttttttgggtatgttttagaatagagtttagtttagagtttaggggtggttgggatgatggatgagggtgtggggtttgttgattattaggggatttgattattgggttgggttagtttttttgtttttatttttttttttgtaaagaaggggtgttgggtgtttttattttttgtgttagttttggggtttttattttggtgggaagggtaggttgatttggtagattgtggttttttgggagggaagaaggtgttagatgtgtggagtaattataaatagttttttttttttagaagatggtatggggtttaagatttaggtgttgtatatttagaatgagagtagagatttttgttaggaaaaaaaggtatttaggggatttgtttattagtatgaaatgtaaatgagtttgtttggttttatttatataattttgtgtatggatttggtgaaagggtaattagggagatgatggtgtagtagttattttgttattttttttattttttttttttattggttggggtgggaattgagatgattttaattttttgtggtggtgggaggtgtgtgggggttgtgtgggtggtgtagttttaggagagtgaataatgtttaggggtgatggttttagtaaagtgaggggtggtgatggaggttatttgatttattttgttgtttttttgtagtggtgtaagtgttttaaaatttttggagagggaattgattgatttattaggttttgttgtgtttattttttgtagatgttggggaagtgttttttggtgtttaatttttgttgtttttttttttattggtgtttagtatatttgtggtgttttgtttttgggtatttatagttttttggagtggtgttggtggtaggagagagttagagttgattgagttttagaatttggggaggtaggtggggtaagggttggggtttgtgtgtgtgtgtgtatgtgtggaaagtataaatttatgagggtttgttgttggtagggttaaggtgagtgagtgaaggtggtagatttgtgaagttttagttttgtggatattttttttttaagttatatagggatttaagagaaattgaggtatgaagttggggggtggtggtggtggggattttgaaggttgagttgataaagtttagttttgtgtttttgtttttttttatatatttgagatttttataggtttttttttaggggtttttgttttgttttgtagttttttttggggatttgggttttgtggtttagtgtgatttgtttggggttatgtgtttaagtatgaagtttttgtgtggagtttatgttttttaaaaggtttttaggggtaaagggatgaagtttaggagtgttaatgtgaggttaggtttagtgggttagggttatgaggttagggttgaagttttagaattgatttgggagtatgattaataagtttaagagatttgtggaggttatgtttagattatgtttattttagttttttttgagttttgtttgtttttttaagattgggtttttttagtttgaagttttatttttaggatatttagttttgtttttttttttttttagttttgtagttaagtttaattttagggtgggagattaattaggtggagatttgggattttgttttgggattttttggtgataatttttatttttgtgttgtttgtttttttttttttttaggtttgtttagagttgagttttgttttttggttgttgtttaaattaggggttgtggataaaggatgtttggggtttgtggttttatgttaggattttgtgttgaatattttgattttttgggttttttttaagggagttttaaagattttaatggttaataggaaagtgggtttggtttgggtagtagtttgattggttttagtttttgggagtggatttaggggtaaggggaggggagaggggtggttttgggttttggggtgggaattggattttagttgtggttttttttttgtgtttttgtttgtattgttatggtggatggttaatgggtgtgtggtttggggttggtggtgtttggtgattggttgtggggttgtttgggggtggggttgaggtttgaagttgaagtgagggatttagttgtggtgtgtgtggggttttttgttgttgtttttgtttgtttgttttgtgttttggttggaggaggaggttgtggtgttggtgatagttatggtagtggtagttattgtggtggttgtggtggtggtatttttgtttttatttttgtttgggattgttttttattgtttttttgttttttttggatagtgagtttgtggtggggtgggggaaggagttgtttttattttttttaagtttatttttaaagagattttttttttttttttttgttgtttggtgtggagttgggatgatgttgattttttagatttggttttagttgtgttgtgggaagagggggtgtttttttttggatttttgttttttgttgttgtttttttttttgtttgtttttttggggtggttttgttgaaggtagtgttgaatttggtaattggagtttgggtgtgaagtgaagaagttggaataaagtgagggggagttggttggttggtttgggaagttttaggggtgtaggggaagtgggatttgtgttgggtggggtttttttgtgttttggtgttttgtgggtagtatgtttttgtgggtagggggagttgggttgaattggtttttttgggggtttagtttgtgttttagagtttattagatgtgtttttgttggggtttttgggttgtgtgaggatattttttttgaggggtgttgtttgtttttttttggattgtttggggttttggttggttagaggatggatgaggaggaggatggagtgggtgttgaggagttgggatagttttggagttttatgtggtttaatgatttgttgggggttgggggtggttggggttggggttagtagaaaaggatttgggtagtgtggattttgaggtggaggggttgttgtatttggtgttggttttggtggtttttttttatttgagttaggatagttgtttgtggagttggtgtttttgtatggtttgtaatttatattttttggggtatgatggttaggtgtggggttagaagggggatgggttgtattgttgggggttgggggggaagaagatttattgttaggtgagttgaagtgagtttggagggtaggtggatggggggggggttgttagggaggggagggggtattagagtgggagtggagatgtgagtaggttttgttggtaatttgggtttattttatttgtgtatatatattttagtttttttgggttgggggggtggggatttaggttaggagaagagagttgtgttttgttggtttgtagttggatgttttttagatgtggttaggggagggttgttattttttagatgtgggaagttttgggagtttgggagttgtattttgtttgtgttggttagtgagttgggtttggtttttgagtttggtggggggtgggtgggggtggtggggaggaagttgtggggatggaggaggggggattgtaattttttgggttttttttttttttttgttttaaagtttgtggtggattttagggtttgattttttaatttggtttttgaggttgaggtttttattgatttagaaggagatgttggggggtggggattaggttttggtttattttattttttattttgtgggttggaggtataataaggagattttggtggtggttgatgttaggggtgtagaatgagaataagatgtggtggaggggagttgtttgtttttggagttgggagtggagtttttttttgttagagtttagtgttgtgggtgttttttatttgatttttatttgatgtagggtgtttaagattgggttggggagttttatgttggattttttttgtggagggaaagattgtgttaagagtttttttagtaagtgggggatggggttaagttggtttaggttatttttttttttttataaataaagagtgtttttgtagattaggtatgggggattgtaggtttgtgaaagttttgaggggatagtaatattgttagtgtgtttattaaggaggatttgggtttattattttagtgtagattttgtagataggtttggggaatgtaagttttatattttagggagatggatttagtattgttttttgtttgtttaggttggagtggtaggggagattttagtttagttagattttagtttaaagtgttatttgatagatgtttggttttaagttttttggtgggttttgttattgggggaaggaaaggtggaggggaggtgttgttgttattttaggtttggatagtttttttgggttttttttttttagtttagaggtttttatagatttagggtgggagattttaggttttttttgtagtttttgtgagtttagtagggattttgttttggggaaggggggtggaaggttggtgttgtttttattttttgtagttttgttgtttttagtgtgtaaagtagggatgagtttgtggtttttttatttttattttttatattttgtgggtttttaggaagttttttttattatattttttttttatttattgttttttttttttttttttttgagttgtagaaagagaggtgtaggttttagaggtttgtgtttttgttgaataggtataattttgaggtttgagtttttagttttaggttttttttttttaggtagggatggagatggagaattgatatggttggaaaggatgggttttgagtaatttttttttttgtttttaattatttattttttttatgaatgggaaaaagtattaatttttatgtttttttttttaagggttttaggggaggtagagagagttttttttttttttttttttgaaaatagatttttaggttagtatttttttttgtttgttttatttttaggtgttagtggagggtttggaggtagatttttttattgagtggtttggatgggggtaagtgttgaggtttggtatgggggaggagaggtgggaggatagtatttattttgggagttggggagtagttttttttaggggagtggtagttgggtgtgtggtattagtattattaggtttggagaagtttgggttggttgaggatgggttgagaataattttttggtaggggattgtttaagttgtgttttttattattgttattttatttaagtattaagagatatttgtatttttgttgttagaggggttttgaattgtttttagggtttttttttttttttttgtggtatttgtgattttttataggttttaggagggtttttgtatgtttttgagttggagggatataaggatatttttttttatttttaattaattgaagttagttaggttttttttggtatattttgttttttggttttttttttttaagggattaggttttttagagaggagatttagatttaggtaggaagtgtgtgtgtgtgtgtgtgtgtgtgtgtgtgtgtgtgtgtgtgtgtgtgttgtaagggaggatagtaaaaggtttagaagtgtaagttttggtgtggagagtaggggtattggtagatagttatttttgttttagattagaggggagtatgttggtttttttagtatgtgtttttgtaagtgtgagggagtgtgttttttttttggggaggagtttttttgtattttttttttggttgttgtgttatatttggaagtttgtgtaggagtttttttaagtttagagtttagtatagtttttttttatttggaaattataggttggtatttgggatgttgagagagggggagtgggaggggggttagagggggaagaggggagtttgttaggagttgggggaggagaggggggggaggtttgaatggtaggagttttaatggtttttagaagtgagtgtgagtgagtgattgtgtgttattttgtgtgtttgagtgtgtttttttagaggggtgggggtataggagtttttggagttttttttgttatattgttttaatgttttaagtttgtttattttttttatttagggagaattttttatttttgtttttagaggaaatggtggggggagtgttttttttgtttttttattaatttttttttttaatttaatttttaaattttaagtttattagaggagattttggggagaagggttggggttggagaattgaatgggattgagggggggttagattattttttggtatgttttttgttttaggtttattttttttttgggttatatatatatttttttttatttgttttgttttattgttttgttgggggattttttattatttgtagtgttagttggagttatttttgggattatttttattatatagttttttttatttttgtttgtttttgtttagtatttattttgttttgtttgttttagttaggatggtgatagatataattgtttatatgtagatatgtgtatgtgtgtgtatatatatatgtatatatatatatagagttatagatgtttgaattagatttttggtttatttttttttttaaagattttagtgggttgttttttttgtgtttttgtgttttatgtttttgtttttgggtggagttggttgtttttttgtgagttttagtttttaatttagttggaagtttttttttttttatatttatgtattgaagtgtggtgaggggggaattatagggaaataggtttgtggggtgaggggggggggttttgttgggggaatttttttttgagttttggagtagggtggagtttttatattttatgttattttaggggttgttgaatttgatagatattaggagtttttttgtgggatgggtgaggtaaggatttatttttttatttttttatttattagaaggttaggatttttgggtttaggtttattttttttttaatgttttttagttttatatttttaggtttttaggtgggaatggggttgttggagggtttgtttgtttttttagtttatgtttagagtttttgtgtttttagaggtgttttagttattttttttttttttttattttttttatttttgtggttgttaggttaagtaagggttttatttagataaagttttatatagaggatttatttgtggagataatatgttttagtttttttttttaggagggaggaaaggaggagggatggaagtggggtttttttttttgttgttttttttttttttgtttttgatggtgggttgtggggagaagaaagattttttttttttttattttttttttgggatttattttagtttggatagttattatagtaatagtagatatgtgattgtataggttttttatagttattatggtaattagtgttttttgtttttttggttattatggggatttgttatatggtttttttttaatttgataatttgtgggtttttttgattttttttttttgtataaggataagataatagttttagttaggggagattatgtgagaggggtttttttaattattatgataataaatttatattatttggtgatatatttttttgttgttatggtaatagaagaatattatatagtgatatattgttatgtttttaaggaaataagttttattttgagaagggtgaaagatttttttttttattaattatttttttatttagagtgttttaaattgttgtgtgttttggttttttttttgtttgtttatgtttatgtgttgtggaaggagagttgtatagggtgggtaggatgttatttggaagtaggttgaattgttaagggatttttaagaaggggttgatatgattaagagttgtgtatgaggttatttgggggtaggttttgtttgtaagaggtttttagtttgagtttgggtaaggtggggatagaaagaggggtaatttttttgtgaggttatttttgtatttttttttagttataagtagtttatttttgttaagggaaataaggtaggaagatttgaatggggatatatatttggtttttaggtagggagatttattgattggttgatttgtttatttatttatttagtttttttaggtattgattatttgttttgtgttaggtattatagtaagttttgtaggggatttaaagatgtattagaatgtttttgtttgttaggagttttagtttagtaggggaggttgataagtgtatagattattaatatggtggaattttgttattagaggggtttaagtagatgttttgggagttttttttttttagagatttattgtttttatatagagatatttatttattggggttttttttagatttttttttttttgtagaggagaggaggggatttgtatggggaaagtagattagtttttgagggtaattgtgtttttttttttttaaatgatggttttttttttgtttttttttttttagggtgatttttggttgaattttattttggggagagatttattgtattttggttttatttagaaaaataattttatggaaatagagtattttttattttttttttgttatttgtttatttttaaaaatttagaattttttttttaaatttttttatttttgtgagggggtgggggttagggaaattgtagtgtattaggatttttggggtattatggataggtggtgagtaggtatgtgagtttaggggagaagggtttgggtggtggagaagagataggggagggttgttaggggtttgagggatttatgggttatgggggagggtatgtggtttgggagttagaatagagatgggttatggttgggattagttgggaggaaggtttataggtttttgaatatttttgttggtttttttatgtttggttaaagtttttttattttagaagtaagattttatttgttttgggttttatagagtttggtttggtgggttatgttaggagttgttataatattttttttatttttattttttagggggtttttggttttttttttttaattttttgttttttgattttttttagtttttttatttttttttattttttttatattttttttaaagaaaataggatatttggttatttaattgtgagtttagtgtttggaattttttaaggtttggaggttgttttgtatatttttttgttgatgggttggaaatgagttattttatagaatttattgtatggaaagatttagggtttagaaagaattttttttttttgtttgttgttttggttggtttgggttggaagttataagtaggtgtgatggtggtaatggttttttgggggagggggtagatattgtttattttgtatggtttgggagttatgtttagtatggtgtttgatatataatgggtttttaatatttaaatgtgtgaatatgtttagtggttatttgagggtgttgagaggttgggaggttggtggtggaagagggagttttgggttttggtgttgtagtaggggggattgtagttgtggatgtttgttttatatttagtgttagggtggttatgataggtagttttgtttgtttgagtagttatggtgtgtagaggaaattattatatattaggagtttggaaattattgttttattttgtttttttgggtgatttttagtatatgattttggtatttttgggttttaatttttttgagttttggggaagaaaatgatttattttagatattttatagggttgttgtgagtattaattgtggtattgtgtgaaagtgtttggtaaattgtaaggtaggtataatttgattttaggtttgtataatatatttatatatagtattttatttgttttttatatttattttgtgaggtagggagaataggatttagattttgtagtaaatttatggtgtttggtatttttataggtatgattgatttattttttaaatggtttgtgtaaatagttagggtatttgtggtttgtttttttttatagatgaggaagttgggtttagagaggtgagatgattaaggtgggattttttttttttgatgaggagtttggggttgggggttggtttgtgtgtatgttagggttttggtattatatttgtttagttttagatggagttaggaggtaaatgaggaggaggtgttagggtggggttggggggttggttttagttttagttttggttagttgtttttttgattgttagtatt

SEQ ID NO: 197 - DNA, 12423 bp, Artificial Sequence
  chemically treated genomic DNA (Homo sapiens)
ggtattggtagttaaggaaatagttggttaaggttggagttgaggttggttttttgattttgttttaatattttttttttgtttattttttggttttatttgaggttaagtaggtgtggtgttagggttttgatatatatgtagattagtttttagttttagattttttattagagaaggggagttttattttggttattttatttttttggatttagtttttttatttgtaaaggaagataagttataaatattttgattatttgtataagttatttggggaataaattgattatgtttgtggaaatgttagatattatgagtttgttgtagaatttgaattttattttttttattttatagggtagatgtgagaagtaaatgagatattgtatgtgaatgtgttatataaatttaaagttggattatgtttgttttatagtttattaagtatttttatataatgttatagttgatgtttataatagttttgtgaaatatttggggtagattatttttttttttagaatttgaggaagttgaggtttagaaatgttgaagttatgtgttgaaggttatttgagaaggtaggatgagatggtggtttttaagtttttgatatatgatagttttttttgtatattatagttgtttaggtaggtagaattgtttgttatgattgttttggtattaggtgtaaggtagatgtttatagttgtagttttttttgttatagtattagagtttggggtttttttttttattattagttttttaattttttaatatttttaaatgattattaggtatatttatatatttaaatattgaggatttattatgtgttaggtattatgttgggtatagtttttaagttgtgtagagtggataatgtttatttttttttttaagaggttattgttgttattatatttgtttgtggtttttagtttagattagttaaaatagtaagtaggagagaggggttttttttaaattttgggtttttttatatagtggattttatggagtgatttatttttagtttattagtaggagaatgtataaaatggtttttggattttagaaggttttaggtattggatttatggttaaatgattaagtattttattttttttaaggaaaatatgagaagggtggggaagagtaaagaggttagaaaagattagagagtaggagattggggaaaggagattagagattttttggggaatggggatgggggaggtattgtggtagtttttggtatgatttattaagttagattttgtagggtttagagtaggtggaattttgtttttggaatgagaaggttttggttaggtatgaagaggttagtaggaatgtttaggaatttatggattttttttttagttggttttagttatagtttatttttgttttgatttttaagttatatgtttttttttatagtttatgaattttttaaatttttgatagtttttttttgttttttttttattatttaggttttttttttttagatttatatgtttgtttgttatttgtttgtggtattttgagagttttaatgtattgtagtttttttaatttttatttttttataagaataagagggtttaagaaaaaagttttaggtttttgggggtaggtagatgatagggaggaaataaaaagtgttttgtttttatggaattgtttttttgagtagagttggagtgtagtggatttttttttagaatggggtttagttaggggttattttggaaaaagggggataggaagggagttattatttggaaagggaaagatatagttatttttaagaattggtttgttttttttatgtaggttttttttttttttttgtagggaaaggggggtttggaaggagttttagtgagtgaatgtttttgtgtggaggtagtagatttttgaggaagaggggtttttaggatatttgtttggatttttttaatggtagagttttattgtgttagtaatttgtgtatttgttgattttttttgttgagttggggtttttgataggtaggggtattttgatatgtttttagattttttatggagtttgttgtagtgtttggtatggagtagatgattaatatttgggaagattgaatgaatgaatgaatgaattaattaattaataagtttttttgtttagaagttagatgtgtgtttttatttaggtttttttgttttgttttttttgatagaggtgaattgtttataattgggggaaggtatagaagtgattttatagaggagttgtttttttttttgtttttattttatttaggtttagattggaggttttttataggtaaagtttgtttttgaataattttatgtatagtttttgattatgttagtttttttttaagggttttttggtaatttagtttgtttttaagtaatattttgtttattttgtatagttttttttttatgatatgtaagtataaatggatagggaagagattaaggtatatgataatttgggatattttgaatagaggaataattaatgggggggggggttttttattttttttagagtagggtttgtttttttgggaatatggtagtatgttattgtgtgatgtttttttgttgttataatgataggaggatgtgttattaggtggtgtggatttgttgttatggtaattaaaaagattttttttatatgattttttttgattgaggttgttgttttgtttttatgtaggggaggagaattagggagatttataggttattaggttgggggaaaattatgtgatagatttttatggtaattaagggaatgggggatattggttgttatagtgattatgagagatttgtgtagttatatgtttattgttgttatggtgattgtttgggttggagtggattttaaagagggggtaggagaggggaggattttttttttttttataatttattattaaaagtagagaaaaaggaaatggtagagagaggaattttatttttatttttttttttttttttttttttgggagagagaattagagtatgttatttttataaatgagttttttgtgtggggttttatttagatagagtttttgtttagtttggtagttgtaagggtgaggaaagtagggagaggaggggggtggttgggatatttttaggggtataggggttttgggtatgggttgagaaggtaagtaggttttttagtggttttatttttatttaggagtttggaaatgtgagattaaggaatgttgaggagaaaatgggtttggatttaggagttttggttttttagtaaatgaggaggtagggggataggtttttgttttatttattttatagagaggtttttggtgtttattggatttggtaatttttagggtaatatgggatgtaggggttttgttttgttttaaagtttaaagggggatttttttagtagaattttttttttttattttataagtttatttttttgtggttttttttttattatgttttagtgtatgggtgtagggggagagaggtttttagttgaattgaaaattgaagtttatagaaaggtagttggttttatttagagatagagatatgagatatagagatataagagagatggtttgttggaatttttggaaggggaaataggttagaaatttgatttaaatgtttgtgattttgtgtgtgtgtgtgtgtgtgtgtgtgtgtgtgtgtgtgtatgtttgtgtgtgagtagttgtgtttgttgttattttggttgaggtaggtagggtggggtgagtgttgggtgggagtaggtgagggtggggggggttgtgtggtgggggtaattttaggaatggttttaattggtattatgggtgatggggagttttttagtagagtggtggagtagagtgggtgggaaggaatgtgtgtgtgatttagaaggaaagtgggtttggggtagaaagtatgttaaggggtgatttggtttttttttaattttatttaattttttagttttagtttttttttttagaattttttttggtgagtttagggtttggaaattaaattggaggagggaattgatgaagagataggaagaatattttttttattattttttttgaggatagaaatggagaattttttttaggtaagagaaataggtagatttggggtattgggatagtgtggtaaggaaggttttagaaatttttgtgtttttatttttttagagggatatatttagatatatagagtgatgtatagttatttatttatatttatttttggaagttattagggtttttgttgtttaggttttttttttttttttttttttgatttttggtaggttttttttttttttttttggttttttttttatttttttttttttggtattttaaatgttagtttgtgatttttaaatgagaaaaagttgtgttgggttttgagtttggagaaatttttatataaatttttagatgtgatataatagttagagagggaatgtggaggaatttttttttgagaggggagtgtgtttttttatatttgtaggaatatatattggaaaggttagtatgtttttttttgatttgaggtaggggtgattgtttgttagtatttttgttttttatattaaagtttgtatttttgagttttttgttgtttttttttgtaatatatatatatatatatatatatatatatatatatatatatatatatattttttatttgggtttagattttttttttaggaaatttggttttttaaaaaggagaggttaagaagtagaatgtattaagaaaagtttaattagttttagttagttgggggtggaggggagtgtttttatgtttttttggtttagaggtgtatagggatttttttgaagtttgtggggagttatagatattataaagagaaagagggaggttttggaggtagtttagagtttttttggtagtaaaaatataggtgttttttggtatttgggtaggatggtagtggtgaggggtatagtttaggtagttttttgttaaaaaattgtttttaatttatttttagttaatttaggtttttttagatttagtaatgttgatgttatatatttaattattatttttttgggggaagttgttttttaatttttaaggtgagtgttgtttttttatttttttttttttatgttaggttttaatatttgtttttgtttagattatttagtgaaggagtttgtttttagattttttattagtatttggagatagggtaggtgagaagagatgttagtttagaggtttgtttttagggagaggggagagaagagttttttttattttttttgggatttttgagaaggaggatatagaggttgatgtttttttttatttgtggaaggggtaaatgattaggggtagagaggagagttgtttggaatttattttttttagttatattagttttttatttttatttttgtttgggagaaaggggtttggggttgggggtttaaattttaagattgtgtttatttagtaagaatatagatttttgaggtttgtatttttttttttgtagtttagagagaaaggaagaaggggtagtggatgagaagaggatgtgatgaggggagttttttaaagatttataaggtgtagaggatgggggtgggggggttataagtttatttttgttttgtgtattagaggtagtagagttgtagagagtgagggtggtattaattttttattttttttttttaaagtagagtttttgttaggtttataggggttataagggagatttggggttttttattttgggtttataagaatttttgagttggaaggaaggagtttagagaagttgtttagatttgagatggtagtaatattttttttttattttttttttttttggtggtaggatttgttagggagtttggggttaggtgtttgttaagtggtgttttgagttagggtttgattgggttggggttttttttattattttagtttgggtagatagggagtagtgttaaatttatttttttggaatgtggggtttgtattttttaaatttatttgtggagtttatgttggggtggtggatttgagttttttttagtgaatatattgatagtattattgtttttttaagatttttgtgggtttgtagttttttatatttggtttgtaggagtattttttatttgtgaaaggggaggagtaatttggattagtttaattttattttttatttgttaaaaaagtttttgatatagtttttttttttataagaaaaatttagtataaaattttttaatttaattttaagtattttgtattgaatggagattgggtaggaggtatttgtggtattgggttttagtggaaaggggttttatttttagttttgggggtagatagtttttttttattatattttgtttttattttgtgtttttgatattagttgttgttggaatttttttgttgtgtttttaatttgtgaggtggggggtgaggtgggttaggatttggtttttgttttttaatatttttttttaggttagtaaaaattttagttttaaggattaggttgggggattagattttagaatttgttgtaaattttggggtgggggaaggagggaaatttaggagattgtggtttttttttttttgtttttgtagttttttttttattgtttttatttattttttattaaatttggaaattaaatttagtttgttaattggtgtgggtagagtatagtttttaggtttttgaagttttttatatttggaggatgatgatttttttttgattatatttggagggtgtttagttgtgagttagtggggtatagttttttttttttggtttggatttttatttttttaatttaggaagattgaggtgtgtgtatgtaggtggggtaagtttgggttattgatgagatttgtttgtgtttttgtttttattttggtgtttttttttttttttggtagttttttttttatttgtttattttttgggtttattttgatttatttggtggtgggttttttttttttttgatttttggtggtgtggtttgttttttttttgattttgtgtttggttgttgtgttttgaaggatatgggttatagattgtgtggagatattagttttgtgggtggttgttttggtttaagtagaagaaaattattggggttagtgttgggtatggtagtttttttgttttggagtttgtgttgtttgggtttttttttgttgattttggttttggttgtttttggtttttgataggttgttgagttgtatgaagttttggggttgttttgattttttggtgtttgttttatttttttttttgtttattttttggttagttggggttttgggtgatttggagaggggtaagtggtgttttttagaggaggtgtttttatgtaatttgggggttttggtgggggtatatttggtgggttttagggtgtaagttgagtttttgggagggttagtttagtttagttttttttgtttgtaggggtatgttgtttgtggggtgttggggtgtagggaaattttgtttggtgtgagttttgttttttttgtgtttttggggttttttgggttagttggttggtttttttttattttgttttggtttttttgttttgtgtttaggttttggttgttggatttggtgttatttttggtgaagttgttttgagagggtgaatgaaaaggggggtagtggtggagggtgggggtttggggaggggtgttttttttttttgtggtgtagttggagttggatttaaggggttagtattgttttggttttgtgttaggtggtgggggaggggaggagggatttttttaggggtgggtttggagggggtgggggtggtttttttttttgttttgttgtgggtttattgtttgggaggggtggggagatagtggggggtagttttgggtgggagtggaggtggagatgttgttgttgtagttgttgtggtggttgttgttgttgtagttgttgttggtgttatagtttttttttttggttgagatgtggagtgagtgagtgaaagtggtggtgaggagttttgtgtatattatagttggattttttattttaattttaagttttggttttgtttttagatagttttgtagttaattgttggatgttgttggttttgagttgtgtgtttattggttgtttgttgtggtagtgtgggtgggagtgtagggagagaattatagttggaatttgatttttattttaaaatttaggattgttttttttttttttttttgtttttgggtttgtttttgaaggttggagttaattagattgttgtttagattgaatttatttttttattggttattggggtttttgggatttttttggagggagtttgaagaattagagtatttggtgtggggttttggtgtagggttgtaggttttaggtattttttgtttatgatttttgatttgggtagtagttggaggatggagtttagttttgggtgggtttggggaagaaaggagataggtggtatgggggtgagggttgttattagggggttttagagtgaaattttaggtttttatttggttaattttttattttggagttgagtttggttgtgggattggggaagggaaggagtggagttggatgttttgggggtggggttttaggttggaggggtttagttttggagaaatgggtggagtttgagaaaggttagggtaggtatggtttgggtgtggtttttataaattttttgggtttattggttatatttttgagttaattttgagattttgattttgattttgtaattttaatttgttggatttgattttatattgatgtttttgggttttatttttttgtttttagggattttttgaagggtgtggattttatgtaggggttttgtgtttgaatatgtggttttaggtaggttgtgttggattgtagagtttggatttttaggaggggttgtggagtagagtgaggatttttaagaaggaatttgtgggggttttgagtgtgtgggagggggtggaagtatagagttgggttttattgatttgatttttaaagtttttattattgttattttttaattttgtgttttagttttttttaagtttttatgtggtttagggaaggagtgtttgtggaattggaattttgtgggtttgttgtttttatttatttattttaattttattggtagtgggtttttgtgggtttgtgttttttatgtgtgtatatgtatgtgtagattttggtttttgttttgtttatttttttgagttttggggtttagttggttttagtttttttttgttgttggtgttattttagaaagttgtgggtatttgggagtggagtgttgtgggtgtgttgggtgttggtggaggggggaatagtgaggattagatgttgggaagtatttttttaatatttgtgagaggtagatatggtggaatttagtgggttagttagttttttttttggagattttggggtgtttgtgttattgtggagaggtggtgggatgggttggatgatttttattattattttttattttgttgaggttattatttttgggtgttgtttatttttttaaggttgtattatttatgtagtttttgtgtattttttgttattgtagagggttggggttgttttagtttttgttttggttgatggggggaggggatgggggaagtggtagagtggttgttgtgttgttgtttttttggttgtttttttgttgaatttatgtatagagttgtgtaaatgaggttgggtgggtttatttgtattttatgttaatgagtagattttttaagtgttttttttttttggtgggagtttttgtttttattttgagtatgtggtgtttgagttttgaattttgtgttgttttttgggaaaggggggttatttatggttgttttgtgtgtttgatattttttttttttttgagaggttgtagtttgttgggttggtttgttttttttgttaggatagaggttttggggttggtgtgagaagtagggatgtttaatattttttttttgtagaggggaaaatgaggatagagaggttggtttagtttaatgattaggttttttggtggttagtaggttttatatttttatttattattttggttatttttgggttttggattgaattttgttttagaatatgtttgaaaggagggtaggtataaatgtattatttagataaattgagatttatatgtatttttttgggtttaggatttaggggagattggttatgtaagataggatttgatttttgtatttggtatgttggggttgatggttagttggagatgtttatttttagtttgagtgttagagaggaggtagaggtagaatttatagggaaggtaaagaagatttgaaattatttttatttaattttagttttttaagttttagttttgatattatttttttagagtggttttttttttagtaagtattttaatgttatttaagtgttaaggtgtttaggatatagtattgagttagatataagtttggaattttatagtatttagtttaggttgggattatatgtttgtgtttgtagtaatgaaatgattatttttttatttaggttttgtgtttttagaggggttatgtttattttgtttattagggttttgtttagtgttgggtataaagttgttaggtgaatgaatgattttaggtagggaaagggaaataaagggataagaaatttttttttttgggttttagttttttaataaagatattaagtttaattaagagtttttttgggtttgaggaagaattttttttatatatattttgtttagttagtttttttagttttttttagttttgtttttattttttttttatagtttatttggttttttgtggagttaagataatttttttatttgtgatattttttgtttagggatgatataattattattttatttagttattttaatagttttgagagttgggtggatggttttttattttttagataaggaaggggggtgtttagaatgatgaagttatttaagtgattgtttagatggtatggttttgtttttagtgattttggtttgtaggtgttttgttggtagaatagggtgtatatttaagagggattagtaaaggggaagggatgttgtaggaatttttataattttgtttttgagtgagatttatgtgggattttgttttttttagaaatttgagtatttttgggagaattaattttttaaggaggtaattttttttttttaatttatttatagaattttattattgtgtgtatattttattttaggagggagagaggagttgttgagtagaaagtagattggttgtagggatagaagatattaagggtatttttttttatagttgtgtttggattttttgtgagaagaggaagttttaggggtttttattgtatttttaagattttagagagaaatagaagtgttgaggggttgtaggtaggttttttattttttttgggttttgaatatttatttataggaggttgaaggtaattgttttgtaatttatttatgagggttaatgggatgatagtggtaagaggggttggtatattgtttagattgttttaaagttagggttggggttgttaaaaaggttatttgtgttttattatgttttatttttttttttttttatttttttaggttgggttttatttgtttagttttttgattttttggtaaggttgagtaggttttagttaggaaggggttagttgattttgttggttggagtattaattttttttagatgggttggtggtttgtattgagggtttggttgtttagatagagttgattttggttttagtgattatgtgtggttatgtgtgattgtgtgaagggagtaattttatttagttttttggtttttttttgttttatttttttttattgttgatattttttataagtagtggttttatgaaggtttttttgtttttagtagttttttttggttttttgtgttgtttagttggagggttgaggatgtttggtatagttgatttttaaaggttttagagggatagtttttttttttgttttttttattttgttagttttattattttgtatttgttttttttaaagtatgtgttttagtttttattttttaatttaaggaagatgtatgtgttaaggataggatttaggagtattttttaatatttaggggaaaggatgaggttataggaaggttttttttgtagtaagaaggatttagataga

SEQ ID NO: 198 - DNA, 3720 bp, Artificial Sequence
  chemically treated genomic DNA (Homo sapiens)
tgtagttgtttattaaaattttatatatattttggtatataattatatttgttggaatttattttatagatatatttatatttatatagttaaggatgttgattttaataatattggtataagtaaaaagttggaaattgtttatatgtttatggataggggataaattgattaatttaaggtttttttttataatggagtattatatagttttgaaaaagaatgataagatttttatgttaggatatggtataatttttaagttattttaagtgaaaaaataataataataataatattgtagaataatgtgtatggttggatatatataaatttttttgaaagaatatttaagaaatttaaatgtggttattttaggagttaggaatgaggtaggtggagaggagggatttttattttttaatttagaatatattttgttgtgttagttgattttttttttattgttaataagtattatagttttttttaatttaaattattttttttagtataaatttaaaaaaaaaaaatttaaaatggaaaaatatataggtgtgagtaaaagaaatgaatggtaataatttttgtggtttattgagtgtgtttggatatttatgtgtttttagtttttttttataggaaatgtataggtgagaaattgatgttaagggggattgagtgttaagttagttagtggtagagggtagatttaaatttaatatggtttttttttgttgttttttggtttttgtttttaggtgggaagtgtatttattggatggttggtttggtgaggtgtagtgttttagattggtgtatttgtggttttagtgttttatgtttggggagtgtgtgtgtatgtagtggtgtgagtttggtggtggtggtgataataataatgttatagtttgagtttttttttttggagtttttggtatatattttgtgtttatgtttgggtatttatgttatggtggtagggttggggttttttaaaatggtagtggtttggggagttggaagtttggagttagtgttgttgtagttatataagtgggggggttgtgggttgggggagtttggtagtgttttggagaggtgaggagttgttgtttgaggttggtgtgggtgagtgagggtgttgtggttttttgattttttttttagaggtgagtgtttgaagttaggagtttggtgtttataggtttgtgtgttgtggggaatttttattgttagtttttttgttatttgtgtgtttttaagtttagtgggtgaggttttgggtgttttatagttggtgttgtgttatgttttattttagtgagttttttgaatttgatgtgttttttgttaagtttattgaaggttgttgtgttgaatttagtgttgaattgttttggttgtttgttagggatgtttttgtggttattggttattttggaggtaaggagggtgagtaggggtgtttagatgatgatggtgtagtgtgggggtgtattatatttgagaattaggagggattgggatattggagttatgagaataggggtgatgggaagtttaggagttttggggtgtgtatttttatttttatttatattgggttgttagtgtttttgtaggaatttgtgtggttattggagtgtttttttgtttgtgtatgtgtgttttgtgtgtgtatgtttttatgtgttttttgggatgtatgtgggtttttgttgaattagaatgtgtaaaaggtattttgtgtatatttgtgggtattaagagttttgtaggtaggggttgtggatttaggtgtattttttgatgtgtttagagttgatttttgttttttttttagtaggtgattttttgagttgggttttgaatagttgtggtgtaagtggggatttagttgatttttgttttttggaggggtttgtgtttatatttttttttggttttagttatagtggtagtttttttatttaggtagtgtttgaatatttgtatgatttggaggtattttttaattttatgttgggtgttttaggtttggtatttttttttggtttagaggtagtagtgtttagatttttgttggatgtttttttttttgtggggtttgatgttttgttgttgggtttgttggatttttattttttggatttgggtgttgttttttttttagaggtgttttgggaggttttgttttgtgtgggtgtttttttgtagtgtttgtatgagttttagttttttttgtttgatgttaagtttggtttttggtggttttttgttttgttagtgttggatgttgtttttgtttttaagggtttttatgtgttttgggagttgttttttgtgggggttttagggaattgtgggttatagggagattattaggttgttttggaggtttgtttttttgtaatagggattaagattgaggatttgttgtttattagttgttttgtggaattgttggttgttttagttaatagattttattttagtggggtttatgatgtttttttgttggttttgggtgatttaggggagggggttgagggtttttttgggtttttgattttttttagtggggagggagggagtagtggtgatggtggagagtttttggttagtatgtagttttagttttttttgttgggtttttgtagtgttgttgtggtggatttttttaaatttttggtggtggatatttttggaagtagtggtgtggttgtattatttgtgttgttgttgttgtttattttttttttttaggttaaggtgtgatgtaaggggtgttgtggtggtaaatgtagtatgtgttgtttttgtttgtggttgtatgttaaggtttttgtttgtttggtggagagttgtgtgtggagttttgtgtgttttgatgagtttaattgttatttgtgtatttatatgggttataaatttttttagtgttgtatttgtttttgtaattttagttgtagtgattattttattagttatgtgtgtatttatattggtgagaagttttttgtttgtgatgtgtgtggttgttgttttgtgtgtagtgatgagaagaaatggtatagtaaggtgtattttaagtagaaggtgtgtgttgaggagtggtttaagggttttggtttttatttgttgggttttttttttgtttttttttgagtaagagatgggtttatgggttggggtgttgttgtttggtgtgtatgagttttgggttgtttttttttttgttttttttttaatttttttttgtatgtttgagggttggtttttgttttgtttttagtttttttgaagtgtttgttgtatatgttttatttagtattagtttgttggatagtttttgtggtttaggtgttgttatttttgttagttgtgttttgggggaagttttttgagattatttagtgaataggtattattttgggatttaagatagttttttgtaattgtatatgttttatgtttttttttataatttttagagataggttggggtaggttaaggtggttttgtgtgggattttgtatagtagtgttttatttagtagttgattggatgtaatgttttgttttgggttttttttttttttgttgttgttaatttttgtaaagtagatgttatttttaagtagttgataaaattgtttatttttgtaattaaaattattgtgttaaaagtttattgaatttgttatgtaagttttt

SEQ ID NO: 199 - DNA, 3720 bp, Artificial Sequence
  chemically treated genomic DNA (Homo sapiens)
aggagtttatatggtagatttagtaagtttttagtataataattttaattgtaaaaataaatagttttgttaattgtttgagagtagtgtttgttttataaaaattaataataataaaaggaaaaaaaatttaaagtaaaatgttatatttaattggttgttggataagatattgttgtataaagttttgtgtgagattgttttggtttgttttagtttgtttttgggggttatagaggaaggtgtggggtgtgtgtagttataaaagattgttttgaattttagggtagtgtttatttattgggtggttttagaagattttttttaaagtgtggttgataagggtgatagtgtttggattgtgggaattgtttggtgagttggtgttgaatagggtgtgtgtggtgggtgttttaaggaaattggaagtgggatggaggttggtttttgggtgtgtgaggaggagttggaagaagagtggggaggggaatggtttggaatttgtgtgtgttgaatggtggtgttttaatttataaatttattttttgtttagagagaagtgaaggagaggtttagtgagtaaaagttgaggtttttgagttgttttttggtgtgtgttttttgtttgaggtgtattttgttgtgttgtttttttttattgttgtgtgtgaagtggtggttgtatatgttgtaagtaaaaggttttttgttggtgtgggtgtgtatgtggttggtgaggtggttgttgtggttgaagttgtggaggtagatgtggtattggaagggtttgtggtttgtgtggatgtgtaggtggtgattgagtttgttggagtgtgtaaagttttgtatataattttttattgggtaagtgaaggttttggtgtgtggttgtgggtagaagtagtgtgtgttgtatttgttgttgtggtgttttttgtgttgtgttttggtttgggggaaaggggtgggtggtggtggtggtatgggtggtgtagttatgttattgtttttagggatgtttgttattagaggtttagggaagtttgttgtggtggtgttgtgaaggtttagtggggaaagttgaggttgtgtattggttagaaattttttgttgttgttgttattttttttttttttattaggaggggttaggagtttagggaggtttttagtttttttttttaagttatttggggttagtgggaaagtgttataggttttgttgggatagagtttgttggttgggatggttggtagttttgtagggtagttgatggatagtaagtttttaattttggtttttattatgggaaaatgagtttttggggtggtttggtagtttttttgtgatttatagttttttggggtttttatagaaagtagtttttagggtgtgtagggatttttgaaggtagagatagtgtttagtgttggtgaggtgggaggttgttggaggttgggtttgatgttgggtggggagagttgaggtttatataggtattgtgagggggtatttgtgtaaggtgaggttttttagaatgtttttgggaaaggggtagtgtttagatttggggagtaaaggtttggtggatttggtagtaaggtattggattttgtaggaaaaggggtatttagtggggatttggatgttgttgtttttggattggggaagggtgttaggtttaagatgtttgatatgaggttgaagagtgtttttgggttgtgtgggtgtttgggtattgtttgaatgaagaagttattgttgtagttgaggttgggagggggtgtgggtgtaggtttttttaggaagtaggagttggttaagtttttatttgtgttgtagttgtttaaagtttagtttaagaagttgtttgttgaggagggagtaggaattagttttgggtatattaaagggtgtatttgagtttatagtttttatttataaaatttttggtgtttatggatatatataaagtgttttttgtatattttgatttagtaggggtttgtatatgttttaaggagtatatagaaatatgtatatgtaaaatatatgtgtataggtaaaagggtgttttgataattgtataggtttttgtggaggtgttggtggtttagtgtgggtgggaatgggggtgtgtattttaggatttttaagttttttattgtttttatttttatagttttaatgttttagttttttttggtttttaggtatggtgtgtttttgtgttgtgttgttgttgtttgagtatttttgtttgttttttttatttttagggtagttggtggttgtgggagtgtttttggtaggtagttggggtaatttagtgttgggtttggtgtaatagtttttagtggatttgatgaggagtgtgttgggtttggaaaatttgttaaggtggagtatggtgtggtgttggttgtggggtgtttggggttttgtttgttgggtttgggggtgtgtgggtggtggggaggttggtggtaggggttttttgtagtgtatagatttatgggtgttgggtttttggttttgggtatttatttttgggaaaggagttggggagttgtggtgtttttgtttgtttgtattggttttgggtggtggttttttgtttttttaaagtgttgttgggtttttttagtttatagtttttttatttatatagttgtggtggtgttggttttgggtttttgattttttgggttattgttattttgggaggttttggttttgttgttgtgatgtaaatgtttaaatatggatataggatgtgtgttggggattttgaaaaggaaagtttgagttgtgatgttgttgttgttgttgttgttgttaggtttgtgttgttgtgtgtgtgtgtgttttttaggtgtggagtgttggggttgtggatgtgttagtttggggtgttgtgttttattgggttgattgtttggtagatgtgttttttatttggaggtagaggttgaggggtagtaggggaggattgtgttgggtttgaatttgttttttgttattaattagtttgatatttagttttttttaatgttagttttttatttgtgtattttttgtggagagaaattgagagtatataaatgtttaggtgtatttagtaaattatagagattattgttatttattttttttgtttatgtttgtgtgtttttttattttaagttttttttttttaaatttgtgttaggaaaaataatttaaattaaaaaggattgtaatatttgttaatagtaggaggaaagttaattagtataatagggtatattttaaattgaaaagtaaaagttttttttttttatttattttatttttagtttttgaggtagttatatttaagttttttgggtatttttttagaagaatttatgtatatttaattatatatattgttttgtaatattattattattattatttttttatttgaaataatttagagattgtgttatgttttgatataaagattttgttatttttttttaaggttgtatagtattttattgtaagggaggattttgagttagttgatttattttttatttatgagtatgtaggtagtttttaattttttatttatattaatgttgttggagttaatatttttgattatataaatgtgaatgtgtttgtgagataaattttaatgagtgtaattgtgtgttaaagtatatgtaaaattttgatagataattgta

SEQ ID NO: 200 - DNA, 8759 bp, Artificial Sequence
  chemically treated genomic DNA (Homo sapiens)
tagtttggaagagggtagttaggggagaagttagggttggagttatgagaaaggataagatgagatgatggttttaatattgaggatagaaagaatattgagatgagaaagtagtttattataagtatttatgtaaaggaaatagtagatgtttataaattagtagaggtaataattttgaaagtttatttataagtttttttttttatttttaatttagtttaaatgtaattatttaaattgttttttatttttttttttggattatgaatgagttttttaaatgtagggtttatagtgttttatttattagtgaattttaagtgtttagtatagagtttggtaaatagtaaatgtttaataaatatttgtttagtgtatgaattggagtgattttttattttgtttataagttgaaaaaaggtttattatatatttaaatatgttgaaattatagggtatttggtaattttttaaaattaaaatttttagtttggaaatagaattttaattttgtgaaaataaaatttatttatttatttaaaaaatatttattaaataatgattatgttttatattaggttgagttttaaggatttaatgatgaataaaaattaatatgatttttgtttttaggaaatatatagtttagtgaggaaaatagattgtgagaagttttttaataaatattgggtgttattaaaatatattaaaaggtgagtgggtgagggatttgagttagtttaggtggtttaggaagtttttttggatgtgttgatatgtataggtattaattagataaatagagagaaggatgaattaatattgtaggtagagggaatagaatatgtaaaggtaggaaggattatggagttgttggaggatttgaataaaggttagtgtaagtggattttagaaaataggaggaaaggtgtatgagatgagattagagaggtagattatgtggggtatggttaatgttttggatttttttattaagagtaatggggagatagtgataggatttaaatggggaaataatatgattagattaaattttttaaaaaattttttatgtaaatatatattgagagttaattattgataaagatttaaaggtaataaagtggagagagaatagtatttttaaaaaatggtgttaaaataataggatatttatattaaaagttgggtatttgtttataaaatttaatttaaaatggattatagatttaaatgtaaaattgaaagttatataatttttggaagaaaatatagatgggaatttgtgtgattttgagtttgaaaatgatttattatatttgatattataatttgtaagttaatataatttataagtgaataaagtgatgaattggattttattagaatttaaaatgtttgtgttttaaaagatattggtatgataatgaagataaattatagataagatattgttgaattatatttttgataaaggaattgtgtttagaatatataattttaaaatttttataataaattataagtagtttaattaaaaaaaaaaaaagagaaaaaatttatagtttttattaaagaaagtatataattgtaaaataagtatatgaaaaatgttttgtatttttatttatgggagaaataaaaattaaatgggaaagatatttttaattagaatattaaaattaaaaagattgattatattaagtattggtgaagtggaaatgtaaaatgatataattatttaggaagatgatttggaagttttttataaaagtaggtgtatatttattttgtgatttatttattttatggttaagtatttatttgagagaaatgaaagaatatatttatataaagatgtttatataaatatttatagtagttttatttgtagtagttttaaattgaaaagaatttaaatgtttattaaaagtgaatggataaataaagtgtggtatagtaatgtaatagaatattatttagtaataaagaagaatgagttagtgatatatataatagtttaaatgtatattaaaggtattgtgtttagtgaaagatgtaagtaaaaaaaaaaaagagtatatgttgtatagttttattgatataaaattttggaaagtgaaaaatagtttatattgatagaaagtagattattggttgtttgaggaggaggagtataggagaggtggagggaaaatgtataaagtggtataataaaaatttttggaattatagatatatttattattttgattgagtgatgattttatgagtgtatgtgtgtgttaaaaatgattaatttatgtaattttaaatatgtgtagtttattgtatatattaattatattttagtatggttattaaaaagaaattttttggttgtataatgtagaattgattttaggaaagagtggagggaggatgattatttatagtgttttaggtggaagagaatggtgttttttggaagtgaattaggttggtaataatagagatgaaataaatgggtagatgtgtgagatatttaggaaataaaatttgatggttattattttttaaaggttagtttattttggttttttagagtaaagagttagggaagattttattaataaattttttttgaagttgtagaggaagtttatagtagaaatttatttttaatttgattaatttgagagaatatttttggttttatttgattattaaaaaattgtaaagaataggaggagaaagaagaagaaagttggtataaatagtgaatttatataatattaattaataattgttttttgtttttaaaagtaatgggaagaaaatgagatttgagttggaagattagagtttaaaatttaaataaagtatatggttttaatatgtttatagtagttaattttttttgataatgatataattgttgatagtattatttttaaaaataaaaataatatagtaattttttagatttgtagaatgtttttttgtttataagtttgttttatatatattatgttttttaaatgatatattagttttttgagggtaatttatattggtaatagtttttagatgtggaaattgtgaagataatgttggtgatgtggaagtaatataaattttggagttttttagatttaggtttgaatgttagattgttttttatttagagtaattttagagtattattttttattttaatttttttttaggtttttttgtgtttatgtgttttttttatttttgtttattgtttatttagtgatttttgtatttttttttattgttagtgtgtagatatatagtttttttggttttgagatttatgttaattttattttattattttgttagtttatttaatttttattgagtaatgttagttgaaagttgtggtgggattaaatgttgtaatgagtatttaaatgaggttgaagtatttatgtattttatttatatatggtgaggtatatttaaggaaggttgtagttattaaaattttaggaaataattttttatttttttaggtgaaagggtttttaggtttttgtgttttggaaggtttatttatagttattttttaaatgataatgtgattgatgagtttagagtttagtttaaatagtaatggattggaagattagtttaggttttattaatgtggaatatagaataaattatgtttttgttttagtttgtttatttgtgaaatagagtttattatatttagttttttttgtttttaggtttgagttattttttttggttaaggtaagtaaatgtttatgatgtttggttgtgtataagataaagttataataaagttataatttattttttttttgtagaagattgtaaaaagtaaaagagatttaggtaaaaattttggaatgatttttggaatagagagtttttttagaattagaagttaaaggaatttaaaatatagggaggtttagggtttttattgatataaaggaaagatgttttttttataggtttatgtttatattttttttttttttttatttttatttgtatttttatttttatatagggtttatgggattttttttataaaagagtagttgtagtaatttatattattttttatgtttggttgtttattaagaggtgaaaagtagttttatataggttttatttttggatagttttagttgtaaagtttaaaatatgtgaaggtaatttggaaaagtaagtggttgtatataaagtaaatgtttatagagttttggataaaattgagtgtttatgtgtatatggtaagtgtttttagtgtttgtgtgtttatttgtttgtttgggtgattttgtttttgagagtttggatgagaaatgtatggttaaaggtaattttagataggaagaaaggtagagaagagggtagaaatgatttttgatttttggggttgagggtttttagagtaaatggtataatgttatgaggtttgatttatttttatgatggaatttaaggttttagtaagtatttgttggtttggttatggtttgttttttagtttgtaggagatttttttatttttttatttgtgtgtttttattagttttgaaaagaatttttggtagttaggagtaggtatttttattgtttttttttttttttttttgtttttattttgttggttttttagattgggttttggaattaaatttggtgagtgttggtttttaggaaatttggagttttggtgtttaaattttggtttaggaaagtaggagttatttaggaagtaggggttttttagggttagagttagttttttttgtttttgtttatgttgtgttagtatttgtttttttaaagttattaggtaggtgttagtgtgtggtgaggggaggggagaaaaggaaaggggaggggagggaaaaggaggtgggaaggtaaggaggttggtttggtgggggtgggatttgatttgtaaattgttgtatttgttttttattttttagtgttttttttgagattttggggagttagtttgttgggagagtgggatggtttggagtaagtttagaggtagaggaggtgatagagggaaaaagggttgagttagttgttttagtgttgtataggagttgaagggatgtattatgttagttttagtttggttttagtgatagttaatgttttttgtagtgtggtggttttgaagttgttgtttggagttgtttttttttttttggtgaagtttttaaaagttgttaaagatttggaggaagtaaggaaagtgtttggtaggattgatggttgtttttgttttttttttttttattttgtttttttttattttgtttttttttttttttttgtttttttttttgtagttgttttagttggttatttttagttaattttttttattatttttttttttatttgtttttttgtttttgttggtttagtgttgttagtttgagtttgtagagaggtaattttttttggttgtgagtgggtgagttagttgtatattgtaaagaaggtttttaggagttaggtgattggggagtggttttagtattgtagttatgatttgtttggttaggttgtatgtggagagaattttttgtttttttttattttttttttatttttttttgttttttttattttgagtgtggagttagagattaaaagatgaaaaggtagttaggtttttagtagttaaaaaataaaataaataaaaataaaaaagttgaaataaaagaaaaagataataatttagtttttatttgtatttattttagtggatattgaatttggaaggtggaggattttgttttttttttttaagatttgggtattttttgaatttattttttaagtattaagagatagattgtgagtttagtagggtagattttgtttattgtgtgtttttttttgtatgagattttgaggttgttagagtgttttttgtgtggttgtttttgtaagtttttttttttggagttttttgtaggtgggtagttagttgtagtgattattgtattattatagtttgttgaatttttttgagtaagagaaggggaggtggggtaagggaagtaggtggaagatttagttaagtttaaggatggaagtgtagttagggttgggaagggtttatttttggttgttgtttaagatttattgaggagttttttagaatttgttttagagtgtgtgtgaagtgatttagaatttgggttttaggtatttagaggttgtgagtgtagtattttttggtgttagtttgttgttgttgtagtagtagtagtagtagtagtagtagtagtagtagtagtagtagtagtagtagtagtagtagtagtaagagattagttttaggtagtagtagtagtagtagggtgaggatggttttttttaagtttattgtagaggttttataggttatttggttttggatgaggaatagtaatttttatagttgtagttggttttggagtgttattttgagagaggttgtgttttagagtttggagttgttgtggttgttagtaaggggttgttgtagtagttgttagtatttttggatgaggatgatttagttgttttatttatgttgtttttgttgggttttattttttttggtttaagtagttgttttgttgattttaaagatattttgagtgaggttagtattatgtaatttttttagtaatagtagtaggaagtagtatttgaaggtagtagtagtgggagagtgagggaggttttgggggtttttattttttttaaggataattatttagggggtattttgattatttttgataatgttaaggagttgtgtaaggtagtgttggtgtttatgggtttgggtgtggaggtgttggagtatttgagtttaggggaatagttttggggggattgtatgtatgttttatttttgggagttttatttgttgtgtgttttattttttgtgttttattggttgaatgtaaaggttttttgttagatgatagtgtaggtaagagtattgaagatattgttgagtattttttttttaagggaggttatattaaagggttagaaggtgagagtttaggttgttttggtagtgttgtagtagggagttttgggatatttgaattgttgtttattttgtttttttataagtttggagtattggatgaggtagttgtgtattagagttgtgattattataattttttattggttttggttggattgttgttttttttgttgtttttttatttttatgtttgtattaagttggagaatttgttggattatggtagtgtttgggtggttgtggtggtgtagtgttgttatggggatttggtgagtttgtatggtgtgggtgtagtgggatttggttttgggttatttttagttgttgtttttttattttggtatattttttttatagttgaagaaggttagttgtatggattgtgtggtggtggtgggggtggtggtggtggtggtggtggtggtggtggtggtggtggtggtggtggtggtggtgaggtgggagttgtagttttttatggttatatttggtttttttaggggttggtgggttaggaaagtgattttattgtatttgatgtgtggtattttggtggtatggtgagtagagtgttttattttagttttatttgtgttaaaagtgaaatgggtttttggatggatagttattttggattttatggggatatgtggtaagtttttttttttagaaatgttgttttttggtttagggtagagttattttgtgttttggggtatttagtggtttttatttgtgtgaatatttagattgtttttgggagagtttagtagggtaaatttagagtttttttgtggatttttggtttgttagaggtttaatttgagtttttttaatttttgttgtgtgttttgggtgttgatttttgtttttttagattttttaatttttttaattgttttaaatttttattattttttggtatttgaggttttaaatagaaattttattgtatgggttatttttagagataaagtttttaagttttttattttttttttttttttgtttttaaagtttgagaattttaataggaatttgggtaattttttttttttaggtttgttaggattttatttttagtttgtgtagattagagttaaaaagattggtttaatagttttttagtgggtattttttagagaggtaaagtgaaatttttggttagggaaagaaagtggtttttgggtgttgaggtttgttgtgtgaaagggtgaattttttttttttgaagtaattggggatttgttttagggttggaggttagtagagataatttaaattgttatgtttagagtaggtagaggggtaatttttttggtaaagattttataggatttgtatttatagttttttaatgttggttgattatgttgaaagtagttgtttgggttggtttttttttgtaaagtgtttattttttttgtggattataatagatttatagttttttattttaggtttgtattagatttataaagaggagaatatttttttaatgtataatttaattaggtttgattttgatttataaaattgttggaaaatatttttttgtaaagtattttttgttattttagtgtgttttaaaatttttattggggagggtggagtgaggttttttattatatttttttatttttaggatatgtttgtattttagaatatgtgtagttagtt

SEQ ID NO: 201 - DNA, 8759 bp, Artificial Sequence
  chemically treated genomic DNA (Homo sapiens)
agttaattgtatatattttaaaatgtaaatatgttttaaaaataaaggaatataataaaaaattttattttattttttttagtggagattttggagtatattgaaatagtaggaaatgttttataaaaaaatgttttttaatagttttgtaagttagagttaagtttaattaaattgtatattaaaagaatatttttttttttatagatttgatgtaaatttgaagtagggggttgtggatttgttataatttatagagaaaataaatattttataagagaaaattgatttaagtaattatttttaatatagttaattaatgttgagaaattgtgagtgtaaattttgtgaagtttttattaagaaagttgtttttttgtttattttaaatatgatggtttggattatttttattgatttttagttttggagtaagtttttagttgttttaggagaaagaagtttatttttttatatagtagattttagtatttagagattattttttttttttaattgagaattttattttatttttttggaggatatttgttgagaagttattgggttggtttttttgattttaatttgtgtaggttgaaagtgaaattttaatagatttgaagaggagaaattgtttaaatttttgttgaggtttttagattttgaggataggaggaaaggaagagtggagggtttgggagttttatttttgaaggtggtttgtgtaataggatttttgtttgggattttgagtattaggaggtagtgagaatttggggtggttgggggagttgaagaatttgggagggtaggaattagtatttagggtatgtagtagaaattaggagagtttaggttaaatttttggtaggttgggagtttatgggagagttttaggtttattttgttgagtttttttaggggtaatttgagtgtttgtgtaggtaggagttgttagatattttagaatatagagtgattttgttttgggttgaaaggtgatatttttggaaggaaaaatttattgtatgtttttgtaaggtttggagtagttatttatttaggggtttattttgtttttgatataagtgggattgggatagggtattttgtttattatgttgttagggtattatatattaggtgtggtgaagttgtttttttggtttgttagtttttgagggggttgagtgtagttgtagggggttatagtttttgttttgttgttgttgttgttgttgttgttgttgttgttgttgttgttgttgttgttattatttttattattattatatggtttatataattggttttttttggttgtgaagagagtgtgttaggatgaggaagtggtggttgagggtgatttagaattgggttttgttgtatttgtgttatgtaggtttgttaggtttttatagtggtattgtgttgttgtagttgtttaggtgttgttgtagtttagtgggttttttagtttgatgtgagtgtggggatggggaggtggtggagggggtggtggtttggttagagttagtggaaagttgtagtagttgtgattttggtatgtagttgttttgtttagtgttttggatttgtagagagatagggtagatggtagtttaagtgttttggagttttttgttgtagtgttgttagagtagtttaggtttttgttttttagttttttggtgtaattttttttgaaaggggaatatttagtagtatttttagtgtttttgtttgtgttgttgtttagtagagaatttttgtatttggttaatggggtataaggagtgggatgtatagtgggtggaatttttaaaagtggggtgtatatgtaatttttttgaagttgtttttttggatttagatgttttaatgtttttatatttaggtttatggatattgatattgttttatataattttttggtgttgttagaaatggttgaagtgttttttaagtaattgtttttggaggaagtgggagtttttgaggttttttttgtttttttgttgttgttgtttttggatattgttttttgttgttgttgttgaaggagttgtatggtgttggttttgtttaggatgtttttaaggttagtggagtagttgtttaagttggggaaagtggggtttagtagggataatgtggatggggtagttgagttatttttgtttggaggtgttggtagttgttgtggtagttttttgttggtggttatggtggttttaggttttgggatgtaattttttttggggtggtattttagggttgattgtggttgtgaaggttgttgttttttatttaggattaggtagtttgtggggtttttatgatgggtttggggagaattatttttattttgttgttgttgttgttgtttggggttagttttttgttgttgttgttgttgttgttgttgttgttgttgttgttgttgttgttgttgttgttgttgttgttgtagtagtagtaaattggtgttgggaggtgttgtgtttgtggtttttgggtgtttggggtttgggttttggattattttgtgtatgttttggaatagattttggaaagttttttggtaggttttggatggtggttgagggtagattttttttagttttaattgtatttttatttttgagtttggttgaattttttatttattttttttattttgttttttttttttttgtttagaagagtttaataggttgtgatgatgtggtagttgttgtagttagttgtttatttgtgggaagttttagagaaggaaatttgtgggagtaattatgtaaaaagtgttttgatagttttaaagttttgtgtagaagaagatatatggtggataagatttgttttgttaggtttatagtttgttttttaatatttgaagggtagatttaaaagatgtttagattttaaaagaaaaaaataaaattttttattttttaaatttagtgtttattgaagtaggtgtaaataagaattgagttattattttttttttttattttggtttttttgtttttgtttgttttgttttttggttattgaagatttgattgtttttttattttttgatttttggttttgtatttggggtggggaaggtaggaggaggtggagagagagtgggggaaaatagagggttttttttgtgtgtagtttaattaggtgggttgtggttgtagtgttgaagttgttttttagttgtttggtttttaagagttttttttgtaatgtgtagttagtttgtttgtttgtagttaaagggagttatttttttgtaaatttgggttggtagtgttgggttgatgggggtgggggggtgggtggggagaagggtggtgaggggggttggttgagagtagttgattgaggtagttgtgggagagaagatgggggagggggggaaggtagggtggggggaggtggggtggagaggaggaggataaaggtagttgttagttttattaggtattttttttgttttttttgagtttttagtagtttttaaaaattttattgaagaggaaagggtagttttgggtggtggttttgaagttgttgtgttgtaagaggtgttggttgttgttggagttgggttggggttggtgtggtgtgtttttttggtttttgtatagtattggagtggttagtttggttttttttttttttgttgttttttttgtttttgggtttgttttggattgttttgtttttttagtaagttggttttttgggattttggagggggtgttgggaggtggagagtaaatgtaatagtttgtgagttgggttttgtttttattgggttggtttttttgtttttttattttttttttttttttttttttttttttttttttttttttttttattgtgtgttaatgtttgtttagtggttttggagaaataagtgttggtgtagtgtgggtgagggtaggagaggttagttttagttttggaggatttttgttttttgaatagtttttgtttttttaaattaaggtttaggtgttagggttttagattttttggaggttagtatttattaaatttggttttaaagtttaatttaaaaaattaatagggtggaggtgagggagggaggaaaaggatgataggaatatttgtttttggttgttaggggttttttttaggattgataagagtgtgtagatgggagagtgggagagttttttataaattgaggagtaagttatgattaagttagtagatatttgttgaaattttagattttgttatagggatagattgggttttgtggtattgtgttatttgttttaggaatttttagttttaagaattagaggttatttttatttttttttttgtttttttttttgtttggaattgtttttaattatgtattttttatttagatttttaaaggtaaaattatttagataagtaggtaaatatataaatattaaaaatatttgttatgtatatataggtgtttaattttgtttagagttttgtaaatgtttgttttgtatgtagttgtttgtttttttaagttgtttttgtatattttaaattttataattggaattatttaaggatagaatttatatagggttgttttttgttttttgatggatagttaggtgtagaggatgatgtgggttattgtaattgtttttttgtggaggaggttttataagttttgtgtaaaggtggagatgtaagtgggaatggaaagagagagaaaatgtaaatgtaaatttataaggaaaatattttttttttatgttagtagagattttgggtttttttatgttttaaatttttttgatttttgattttggggaggttttttgttttaaaagttattttgagatttttgtttgggttttttttgttttttgtagttttttatagagaaaagatgggttgtagttttgttgtagttttattttgtgtatagttaaatattataggtatttatttattttgattaaagaaggtaatttaaatttaaaggtaaggaagattggatatgataggttttattttatagatgaataggttgaaataaggatataatttgttttatgttttatattagtaaaatttaaattagttttttagtttattgttatttgagttagattttagatttattaattgtattgttatttgggaaatggttataaatgaattttttagaatataaaggtttgaagatttttttatttgaggaggtgaaaaattattttttgagattttaatggttatagttttttttgaatatattttattatatgtaagtagaatgtgtagatattttaattttatttgaatatttattgtaatatttaattttattataatttttaattagtattgtttaataggaattgagtgggttggtaggatggtagaatggaattaatataggttttagagttaggagaattatgtgtttatatattaatagtgaaggaaggtgtaaaaattattgaatgaataatggataggagtgaagaggatatatagatataaagaggtttgaaaaaaaattaaggtgagaaataatgttttgaagttattttgaataaaaagtagtttgatatttaaatttgggtttgaaagattttaaagtttatgttgtttttatattattaatattgtttttatagtttttatatttgaaaattgttgttaatataagttatttttagaaggttagtgtgttatttaaaagatataatgtgtatagaataaatttgtaaataggaaagtattttataaatttgaaggattattatgttatttttatttttaaagatggtgttgttaataattatattattattaggaaaggttaattattataagtatattagggttatatattttatttggattttgaattttgattttttagtttaaattttattttttttttattgtttttaagaataagagataattattgattaatattatataagtttattgtttgtattagttttttttttttttttttttttgttttttgtagttttttagtaattaaatggaattagaggtgtttttttagattagttaggttgagagtaagtttttgttataagttttttttgtaattttaagagggatttattaataaagttttttttagttttttgttttggaaagttaggatgagttgatttttggaaaatggtgattattgggttttattttttaagtattttatatatttgtttatttattttatttttgttgttgttaatttagtttatttttagaaggtattgtttttttttatttggagtattgtaaatggttattttttttttatttttttttagaattagttttgtattgtgtagttagagggtttttttttaatagttgtattgaggtataattgatatatataataaattgtatatatttaaagttgtataaattgattatttttgatatatgtgtgtatttatgaaattattatttaattaagatagtgaatatatttatgattttaaaagtttttattgtgttattttgtatattttttttttattttttttatattttttttttttaggtaattaatgatttgttttttgttagtatagattgttttttattttttagagttttatgttaatggaattatatagtatgtatttttttttttttttatttgtattttttattgagtataatgtttttgatgtatatttaagttgttatgtatattattagtttatttttttttattgttaagtagtattttattgtattgttgtattatgttttgtttatttatttatttttgatggatatttgggttttttttagtttggggttattataaataaaattgttataaatatttgtataaatatttttgtatggatgtatttttttattttttttaggtaaatatttagttatggaatgggtgagttatagggtaggtatatatttatttttgtaagaaatttttaaattatttttttaagtgattgtattattttatatttttattttattaatatttggtatggttagtttttttaattttagtattttaattagaggtgttttttttatttaatttttattttttttatgaataaagatgtagagtattttttatgtgtttattttataattgtatattttttttgatgaagattgtaaattttttttttttttttttttttaattgggttatttgtaatttattatgggggttttagagttatgtattttgagtataatttttttattagaaatatgatttaataatattttatttgtagtttgtttttattattatattagtgttttttgaagtataaatattttaaattttgatgaagtttagtttattattttgtttatttatgaattatgttaatttatggattatggtgttagatataataaattatttttaaatttaagattatatagatttttatttgtgtttttttttagaagttgtatagtttttagttttatatttaggtttgtgatttattttgaattaagttttgtagatagatatttaatttttaatatagatgttttattgttttggtattattttttgaaaatattattttttttttattttgttgtttttgaatttttgttaataattaatttttaatatatatttgtatagagggttttttagaaagtttaatttggttatattatttttttgtttaagttttgttattgtttttttattgtttttaatagaaaagtttaaaatattaattatattttatatgatttgtttttttgattttattttatatatttttttttttgttttttgagatttatttatattggtttttatttaggttttttaatgattttataattttttttgtttttgtatattttgttttttttatttgtaatgttggtttatttttttttttatttatttagttaatgtttatgtatattagtatatttaggaagattttttgaattatttaggttagtttaagttttttatttatttattttttaatatattttaatagtatttagtatttgttggaggattttttataatttgttttttttattgaattgtatgttttttaagagtaggaattatgttggtttttgtttattattgaatttttaggatttagtttggtgtgggatatggttattgtttaataaatattttttgaataaatgaatggattttatttttatagaattaaaattttgtttttaaattgggagttttggttttggggggttgttaaatgttttgtgattttagtatatttaggtatgtaataaatttttttttaatttatgagtaaagtagagaattattttaatttatgtattgaatgaatatttgttaagtatttattatttgttaggttttgtgttaggtatttggaatttattgatgaataggatattgtggattttgtatttaaggagtttatttatgatttaggaaggagagtgaagaataatttaaataattatatttgaattggattggagatgaaaagaggggtttatgaataaatttttagagttgttgtttttgttgatttgtggatatttgttattttttttgtatagatgtttataatggattatttttttattttaatattttttttgtttttaatgttgaagttattattttattttatttttttttatagttttagttttaattttttttttggttgtttttttttaggtta

SEQ ID NO: 202 - DNA, 8404 bp, Artificial Sequence
  chemically treated genomic DNA (Homo sapiens)
aggaagttaaaaattttgaaaaaaggttagaggaattgttatttaaaataagtagtttagagaagaatataaatgatttgatggagttgaaaaatatagtataagaattttgtgaagtatatataagtattaatagttaaagtagaagaaaggatattagagattgaagattatttttatgaaataaagtgtgaagataagattagaggaaaaagaatgaaaagaaatgaataaagtttttaagaaataggggattatgtgaaaagattaaatttatgtttgattgtttttgtatttgaaagtgatagggagaattgaattaagttggaaaatattttttaggatattatttaggagaatttttttaatttagtatgataggttaatattttaatttaggaaatatagagaatattataaagatattttttaagaagagtaattttaagatatataattgttagatttattaaggttgaaatgaagttaaaaatgttaaaagtagttagagagaaagttgggttatttataaagggaagtttattagattaatagtggatttttttgtaaaaattttataggttataaaagatgggggttaatatttaatatttttaaagaaaggaatttttaatttagaattttgtatttagttaaattaagttttataagtgaatgataaataaaattttttatagataagtaaatgttgagagattttgttattattaggtttgtattataagagtttttgaaggaagtattaaatatggaaaggaaaaattggttttagttattgtaaaaatatattaaattgtaaagattattgatattatgaagaaattaatgggtattaattaatgggtaaattaattggttagtattataatgataggattagatttatatataataatattaattttaaaagtaaatgggttaagtgttataattaaaagatatagattggtaagttggataaagagttaagatttattagtgtgttgtatttagtagatttattttatatgtaaagatatgtgttttaaataagggaatggaggaagatttattatagtaatggaaagtaaaaaaaaaaaaaagtaggggatgtaattttagtttttgataaaatagattttaaattaatgtagattagaaaaagataagaagggtattatatgatggtatagggattaatgtaatatgaagagttatttattttaagtatgtatgtatttaatataggagttattagatttataaagtgagtttttggagaggaagaaagagatttagatttttatgtaataatagtgggagattttaatattttgttgttaatatttgatagattaatgagatagagtaattaataaggataattaggattttaagttagttttgtattatttagattaaatagatatatttaatatatatatatatatatatatatatatatatattttttgagatggggttttgtttttgttgtataggttgaagtgtagtggtatgattttagtttattgtaatttttgttttttgggtttaagtgatttttttgttttagtttttagagtagttgggattataggtatttgttattatatttagttaattttgtatttttggtagagatgtggttttattatgtttgttagtttggttttaaatttttgattttaggtgatttatttgttttggttttttaaattgttgggattataggtgtgagttattgtatttggtttagattttgttgaaattttaatatttttttggtaatgtaatagaaaattaaagattttgatggtgaatttaattgtttttgagttgtgtggatgaaaatatattttattatttttttttttaatttttaagtttttaggtatatgtgtaggatgtgtaggtttgttatataggtaaatgtgtgttatggtggtgtgttgtatagattaatttattattatggtattaagtttagtatttattagtttttttgatgttttttttttttttatttttttttgttataggttttagtgtgtgttgtttttttttttgggtttattttatggtatgtatgtgtgtatgtgtgtgtgtgtgtgtgtgtgtgtgtgtgtgtgtgtatttatttatgtgtatatattatgatatatatattatattttttttaaattattattttaggtttagggatatatgtgtaagtttgttatataggtaaattgtgtgtttttggggtttggtgtgtatagatttttttattatttaggtaataagtgtagtatttgataggtagttttttgattttttgtttttttattttatatttttaagtaattttttagtgtgtgttgtttttttttttatgtttatgtgtttttattgtttagtttttatttataagtgagaatatgtagtgtttggttttttgtttttgtgttagtttgttgaggataaaggtttttggttttatttatgtttttgtaaaggatatgattttatttttttttatggttgtaggaaaatatattttatatattagtgaatatagttaaattaatttatggttaagatatatatttttttgtaaattgagaaatttttttattataattgtaatatggtaataaataaatttagattatataaatgtaatttagatgttgataaattggttttaaataaagtaagtgatatttatgtatgaagagagtttattttagtttttagaatttttttttatttttttgttatttttatttttagtaagtaagtatttattgtgtgtgtaatattgtgttaggtattaaggtaatgatgatatttaagatttggtttttattttgaagataagtataggagaaatattattagttatgatgttttttgttgtaaataagtgaaaattttagtttagtttaggttagttttagggttggttaaattagaggtttatttataatattgaggatttagatttttttgaaattttttttgtattaatattagtatttttattttttttgtagggtggtttgttttatgttataatggttgtagtaattagaagtgttatatttttagtaatatttaatattattattattatttaataatatttagaattgtgttatttttgttttaatttattaggtttttagtagattattttttattttttaaatgttaaaattgtattttgagtttttgtttaaattaatttggggtgaggtgaatggaagtagtattttaattgtatttattttttgtagttggatttgggtttgggttattttttgatatttgtttataagaaagatttttgaagttaggtaggaatggttgttgagtaggttagtgtttgttaaatttttatatatttttatatatgttataatatgtagataaaaagataattttttatataatttgttgggataaatttaggaggtttatagtatgatttgtttgaaggttttttttgttttagattttgtttagttgttttaggatgaggggatttatattatagtataattgtattttatttatagtataaattattttttttttttttagttgatgagtttagatgggtaataatagtgtttgttaaagagaaaaaaaaatgtatttaaattagataatttattggtataaatattgagatatagaagtgataatagttttaagttaatgtttgatggtggtagttttagtaagtttttttttgatgtttttgtgtttttgtatatgttttttttttgttattgttttttttattaaatataatataatggataagtggaattaaatagaattgagtttaaattttttgttatttattggttttggtattggataaattaatttttttgagtttgtttttttatttgtaatgtagattagttaatattatttattggaaagtgttgttttttagttaatgtatgtaaggtttaaaatttagatgatgggttgataggtgtagtaaatttttatggtatatgtatgtttatgtaataaatttatatgttttgtatttgtattttggaatttaaagtaaaaaaaaaaaaaaaaaaaaaaagaaagaaagaaaaagaaaaaaaaggttgtttttggggattaaataagataattatgtaaggtggttagtatagtttttggtatatagtaaatgttaggtttgtttgatagatttttatttagtagttattgtttttttgaaaattttttttagatgtttttatggtgttttttgtttttatattattataattttttattatattattatttgtttattttttatagttttttttttttttttttttaattagtgattttaaaaggttagtaagtgtttaatattttttattttttaagtgattggtaaagttttgtatttattagtgttttaagtttgtttttgttttggttgattttgtaaaatggattgggtgggatgagaggtggggggtgttgttaaggagggagagtggtgtttttgttgagggtgtattagttagatattttttgtggggtttgagagttttttttattagattttgggatagggatgaggtttatagttatttattagattttttgtatagttttgttaagtgtattttggtttggagggggtggttttgggtagaagtatgtttgggttgtgttggatgttttttggaaggtgtttggatttatgttaggttttttagtttaattttttatgatttagtgttttagtttgtgtattgattagtgttttagttttttatagatgttggtgggtttgggagttttgtggatgtgatgttgtgggtggaagtgatgtttttttgtggttggatgtggtgtttagttgttgggtgggggagggtgtgtttggttttttttaggggatgttgaaattatttttgtaatgggagttgggagaggatggggtgtgttttgatgtgtgtgtgtgttgttttttttggtgtttttttatagtttgttggtttttgttgtggaaaggtgttatgttgtttaaaattttttgaaaaatggttgttattgttgttgttgttgttgtggaatttttggtattgttgttgttgtttttttttgaggaggatttagagtaggatagtggtttggaggatttgttttttgttaggtgagtgagtagagttgttgttgttttatgtgggaagggtgttttgggtgtgtgtagggtgggtgtaaggtggtttggtggggatttgtttttgttaggggttgggttttggtgggaggaggtgttttttttgttttttgttatggtggagtgtttgtagaatggtgataggattttgggtttttgggtgaggggttttggttttaatttgataggtgttgggtgggtggggttagggttttgagtgaagtgataggtgtagtttttttttgtgaggtttggaggtagagggttgttgtgagtgtttattagatgtaaaaaatgaaaaataaaaatataaaaatggtgtttgtgggagagttttttattggagaattggagtattttggtggttgtttgattttttgttttggtttatgtgatgtaatagttgggaagtatttttttttgggtgtgtattgtatttgaagtttatttgtgggagaggttgattagaaagttttggataagaagtgtagggttttgagtgtttattgtttataggatatttggtttaggagttttgtggtgtttttttagaataataatgtattgaggttttggggatttaaagttatttgtagtgattgatggagtgtaattttttagaggaattgaaatatgggtaaaatttttatgagatatttattagaagtgtttgaaagtttttaaattttttttttttttgtttgatgaattttttttgtgtgttagttggttttggtttgttttattattttttttattttgttttttgattttgaattagtaaggattttggtgttttttttttttgtttttgtttttggtataaaattagtggttttgtgtgtaaatggaaatttttgtttttttttattaagtggaatttaaatttaagtaagtttatatgaatgtattagattttgaagggaagtatttattgtattataatattttattttttttgatttttttattttatggttaaatagttatgattgaaagagtgtaattgttattattgttagtattggttttattttgagataagtttattgtagagggaatgggatttgtttttgttttttattatttttttttttatttttgtttattattaaatttttttatttttatttatttttttttatttggtatatattaataatttatggtagaaaagattgaagtgggatttaggaaatggtttttggaaggttattaaaaatttatatatttaaatggattgttttataggttagttaaaaattatatttgttaaaaaattaaaataataataataaaaaattaaaaattatgtttggggtatgttttgggaaaagatatggttttagtttttgattaaattttgatgtatttaatttttgtaaattttttttgggaaaatgtagtaatggttattttaaagaattttatgttatgtatatagttttggaagtatattttaatgtagggtaattaggaatattgatgttgtggttattgtttggaaaaaagaggattgttttttttattttttaatttattttatatattttaagtaatggaattataaaaaatttttttataagttaaaattatataagatatagtttgtttttgattatttatatttataaagggttttattaatatagatagttgaattttataaattaattagtaagggtagaattattgttgtgtagtttgatattgagtattttgtttggagatggaattaaggtttagtttaattgtatttttagtgatagattttatttttgatttgagagtttagattttatttttgttgttttatttttggtttaagtaatgtagttggaagggaaattgttattaggaatagtatattatatttattgttgaaataattaaaggttaattatgttttgagttgggtgtgatggtgtgtatttgtagtttatgttatttaggaggttgaggtaggaggattatatgagtttgggagttggaggttagtttgggtaataatgtaagattttagtttttaaaaaaataaaaaagttgattaggtatgttggtttatgttgtaatgttagtattttgggaggttaagatgggaagattgtttgaggttaggagtttgagaggagtttgggtaataaaataagattttgtttttaaaataaattttaaaaaattagttagtggttgtggtatatttgtaggtttatttatttaggaggttgaggtgggaggatttttgagtttaggagtttgagattgtagtgagttatgattttattattgtattttagtttggatgatagagtgaaattttattttaaaataagaaaaaaaaataaaaattaattatgttttgaaggaggaattggtagtttagaatagtggttaagggtatggattatagagttagattgttgggtttatatagtggtttattttttattggttgagattttaggtaagttttttaatttttttaatttgatagatatttgtaaatgtttatttttatagatgagaatatttatttaaaagggttgatgttgggatttagtgaaattatatgtttaaggtattttttataggattatagtaaatatttaaaaattattaattattttttatattatttttattagtagataatatatagaaattagatgaatgaaaatgaattagttaataagaatttattaaatgtttgtttttgttaaggggaaaggataaaaataagtagttgtattatgtaagatgtgttagtaggtagagagatatatgaaatattgataagagaagattatagtttaataaagttattggtgttgaattgtataatattatttatgggtttttatttttttgttgttatttttattttatttttttaaatagttttagttattatatttatttttttttatagaagtgttttgttgttttgaagtatatttgatttattatgtaagtaaatattttttattgtgtggtatttttattttggaatgattatgaaaaagataattatatgtttaaatttgaagtgtaatgtttttttaagataaaataagattttaaagtatttaataatgtttttttttatagtagtgttatgtgtaaattattgaaataagtatgtattgaattaatttgatttataagtatatgttaattatatgattatttttatttggtagg

SEQ ID NO: 203 - DNA, 8404 bp, Artificial Sequence
  chemically treated genomic DNA (Homo sapiens)
tttattaaatgaaaataattatataattggtatatatttataaattaaattgatttagtatatatttgttttaatagtttgtatataatattattgtgaaaaagaatattattaaatattttaagattttattttattttagaaaaatattatattttaaatttaaatatatgattattttttttatggttattttaaaataaggatattatatagtgaaaaatatttgtttgtatggtaagttaaatatattttaaagtagtaaaatatttttgtgaaggaaagtaaatgtaatagttaaagttgtttgggaaaataggataaagataataataaaaagataaaaatttatagataatattatataatttaatgttagtgattttgttaaattgtagtttttttttattaatgttttatatatttttttatttattagtatattttatatgatgtgattgtttatttttgttttttttttttaataaagataagtatttaataaatttttgttggttaatttatttttatttatttaatttttatgtgttatttattaataagaatagtatgaagaataattaataatttttgagtatttattatgattttgtagaaagtattttaaatatatggttttattgaattttgatattagtttttttagataagtatttttatttgtaaaagtagatatttatagatgtttgttaaattggagaagttaaagaatttatttgaggttttagttggtaagaggtaaattattatgtgagtttaatagtttaattttataatttatgtttttgattattattttagattgttaattttttttttaaaatataattagtttttgttttttttttttgttttgaaatagggttttattttgttatttaggttggggtgtagtggtgaaattatggtttattgtagttttaaatttttgggtttaaggatttttttattttagttttttgagtagatgagtttataggtgtgttatagttattggttaattttttaaaatttgttttagagatagggttttgttttgttgtttaggttttttttaaatttttggttttaagtaatttttttattttggttttttaaagtgttggtattatagtgtgagttaatatgtttggttagtttttttgtttttttaaagattggggttttgtgttgttgtttaggttggtttttaatttttaagtttatgtgatttttttgttttagttttttgagtagtatggattataggtatgtgttattatatttagtttgaaatatgattaatttttgattattttaataatgaatgtggtatgttgtttttagtgatagttttttttttagttatattatttaggttagagataaggtaatagaaataagatttaaatttttaaattaggaatggaatttgttattggaggtgtagttggattgagttttgattttatttttaggtaagatgtttagtattagattgtatggtagtggttttatttttgttggttaatttatagagtttaattgtttatgttaatgaaattttttgtgggtatggataattaagaatagattgtattttgtatggttttgatttataagagaattttttatagttttattatttaaaatatataaaatgagttaaaaaatgaaagaaatagtttttttttttttaagtagtggttataatgttaatatttttggttattttatattagagtatgtttttaaagttgtgtgtataatatggaattttttagagtagttattattgtatttttttaagggaaatttgtaagaattggatatattagaatttaattagaaattaaagttatgtttttttttagaatatgttttagatgtggtttttaattttttgttgttgttattttggttttttaatgaatatggtttttaattgatttataagatagtttatttaaatatataaatttttaatagttttttaggggttattttttaaattttattttaattttttttgttgtgaattgttagtgtatattgagtggaaagaaatgggtgagggtgaaaggatttggtgatagataagaatgggagagaaaatagtgaaaaatagaaataagttttattttttttgtaatgaatttgttttaaagtagaattagtgttgataataatgataattatatttttttaattatagttatttaattataaagtagaaaaattaagaaaagtaagatgttgtaatataataaatatttttttttaagatttagtgtatttgtatggatttgtttaaatttagattttatttaataagggaaaatgaaaatttttatttgtgtatagaattattaattttgtgttaaaaataaaggtaaaaagaggggatattaagatttttgttggtttaaagttaaaaggtaaaatggaagaaataatgagataagttgaagttgattaatatgtaagaagagtttattaaataggaaaaaaaaaagtttagaaatttttaagtatttttggtaaatgttttatgaaagttttgtttatgttttagtttttttaaagagttatgttttattaattattatagatggttttgagtttttaaggttttgatgtattattgttttaaggaaatgttgtaaagtttttgagttgagtattttgtgggtaatggatatttaggattttgtgttttttgtttaaggttttttggttggttttttttataaatggattttagatgtagtgtatgtttggaagaaaatattttttaattgttgtattgtgtgaattaaaatagaaagttagatgattattggagtattttaattttttggtgaaaaatttttttatagatattatttttgtatttttattttttattttttgtgtttgatggatgtttgtaatgattttttgtttttgagttttataagagggaattgtatttgttattttgtttaggattttagttttatttgtttgatatttgttaagttgaagttgagattttttgtttaagaatttagaattttgttattattttgtagatgttttgttgtggtggggggtagggagggtgtttttttttgttgggatttggtttttggtgaggatgggtttttgttgagttgttttgtgtttgttttatgtatatttggggtgttttttttgtgtgaggtgatggtggttttgtttgtttatttgatgagaggtaggttttttgggttgttgttttgttttgggttttttttaggagggggtggtggtggtggtgttgggggttttgtggtggtagtggtggtggtggtggttgttttttggggggttttgggtggtatgatgtttttttgtggtgggagttagtgagttgtggaggagtgttggggaggatgatgtgtgtgtatgttggggtatgttttgtttttttttgatttttgttataaaaataattttaatgttttttgagaaaaattggatgtgtttttttttgtttggtaattgagtgttgtgtttaattgtgggaaaatgttatttttgtttgtggtgttatgtttgtgaggtttttgggtttgttggtgtttgtggggaattggggtgttggttggtgtgtgggttgggatgttaagttatgaggaattaaattgggaaatttggtgtgggtttaggtgttttttaggaggtatttggtgtggtttggatgtgtttttatttagaattattttttttaggttggggtgtatttaatggggttatataaagagtttggtgggtgattgtgggttttatttttattttggggtttgatagggaagatttttgggttttgtagggaatatttggttagtgtatttttggtgggagtgttattttttttttttggtggtgttttttattttttattttgtttaatttgttttgtaaagttggttaaaataaaaataaatttggagtgttgataggtgtggaattttattagttatttagaagatagaaaatgttagatatttgttggttttttgggattattggttagggaaaggaagggagggagttgtggggaatgaatggatagtagtgtaataaaggattgtagtggtgtaagaatgggaagtattgtggaaatgtttgaggaagatttttaggggagtagtagttgttgaatagaagtttgttaggtaggtttgatatttattatgtattaggaattgtgttggttattttatataattgttttatttaatttttagaaatagttttttttttttttttttttttttttttttttttttttttttttttttattttaagttttgggatataagtgtagaatgtgtaggtttgttatataggtatatgtatgttatggaggtttgttgtatttattaatttgttatttaggttttaagttttgtatgtattagttaagaaataatgttttttaatgggtagtattagttagtttatgttgtagatgaggaaataggtttagaggagttaatttgtttaatattagggttgatgggtagtagagaatttgaatttaattttatttgattttatttgtttattatattatgtttgatgaagaaaatagtgatagagaaggagtatgtgtaaaggtataaagatattagaaaagagtttgttgggattattattattaaatattggtttaaagttgttattatttttgtgttttggtatttgtattaatagattatttagtttgaatatatttttttttttttttggtagatattgttattgtttatttgaatttgttaattgagaaggaaagagatggtttatgttgtgaataaaatatagttgtgttgtgatgtaaatttttttattttggagtagttgagtaaggtttaaggtaggaagaatttttaagtaggttatgttgtaagttttttgagtttattttagtaagttgtataagggattatttttttatttgtatattatgatatatgtgaggatgtgtaaaggtttggtaagtattggtttatttaatagttatttttatttaattttagaaattttttttgtgggtaaatgttaggagatagtttaggtttaggtttagttataaagaatgaatataattaaagtgttatttttatttattttattttagattagtttaggtaagagtttaggatgtagttttgatatttgaaagataaggagtagtttgttgggagtttgataaattgaaatagggatggtatagttttaaatattattaaataatagtaataatattaagtattattgaggatgtgatatttttgattgttgtagttattgtaatgtgaggtaagttattttatagagaaggtagaaatgttgatattggtgtaggaggaattttaaaagaatttggatttttagtgttataaatgagtttttgatttggttagttttggagttgatttaagttgagttgaggtttttatttgtttgtaatagaaagtattatgattgataatgttttttttgtgtttatttttaggatagagattaaattttgggtattattattgttttagtatttagtatagtgttatatatatagtaaatgtttgtttattaaaagtagggatggtaggaaagtgaaggaaagttttaggaattgaagtaaattttttttatatgtagatattatttgttttatttaaaattagtttattaatatttagattatatttatgtaatttagatttatttattattatattataattatgataaagagattttttaatttataaaagaatatatgttttgattatggattaatttaattatgtttattagtatgtaaaatatatttttttgtagttataaaaaggaatgagattatgttttttgtaggaatatggatggagttagaagtttttatttttagtaaattaatgtaggaatagaaaattaaatattgtatgtttttatttataagtgggagttaaataatgagaatatatggatatgaagaggggaataatatatattgggggattatttgagggtgtagggtgagaggatagaagattaaaaaattatttattaggtattatatttgttatttgggtggtgaaaaaatttgtatatattaaattttagagatatatagtttatttatataataaatttgtatatgtatttttaaatttaaaataatagtttgaaaaaagtgtggtgtatatattataatatatatatataaatagatatatatatatatatatatatatatatatatatatatatatatatatatatattataaaatagatttaggaaggggaataatatatattggggtttgtagtggggaagggtggggagagggagagtattaggagagttaatggatgttgggtttaatattatggtgatgggttgatttgtgtagtatattattatagtatatatttatttgtgtaataaatttgtatattttatatatatatttgggagtttaaaagttgaaggaaaaaataataaaatatatttttatttatataatttagaagtaattgagtttattattaaaatttttagttttttgttgtattattaaagaagtattagaattttggtagagtttagattaggtatggtggtttatgtttgtaattttagtagtttgggaggttaaggtgggtggattatttgaggttaggagtttgagattaggttggtaaatatggtgaaattatatttttattaaaaatatgaaattagttgagtgtggtggtaggtgtttgtaattttagttattttggaggttgaggtaggagaattatttgaatttaggaggtagaggttgtagtgagttgagattatgttattgtattttagtttatgtgataagagtaagattttattttaaaaaatatatatatatatatatatatatatatatatattgaatatgtttatttagtttgaatggtgtaaaattgatttgaagttttgattatttttgttaattattttgttttattgatttgttaaatattgatagtggggtgttaaagttttttattattattgtgtgggagtttaagtttttttttttttttttaaggatttgttttatgaatttggtagtttttgtattgggtgtatatatatttaggataggtagttttttatgttgtattgatttttatattattatgtaatgttttttttgtttttttttgatttatgttggtttaaagtttgttttattagagattaggattgtattttttgtttttttttttttttgttttttattgttgtggtaaatttttttttatttttttatttagagtatgtgtttttgtatgtgagatgagtttgttgaatatagtatattgatgggttttgattttttatttaatttgttagtttgtgttttttaattgtggtatttagtttgtttatttttaaggttaatattgttatatgtgaatttgattttgttattatgatgttagttagttagtttgtttattagttgatgtttattagtttttttatagtgttaatggtttttataatttggtatgtttttgtagtggttgggattaattttttttttttatatttagtgttttttttaggagtttttgtaatgtaggtttggtggtgataaaattttttaatatttgtttatttgtgaaggattttatttattatttatttataaagtttagtttggttggatataaaattttgggttgaaaatttttttttttaagaatgttgaatattggtttttattttttatggtttgtagggtttttgtagagagatttattattagtttgatgggtttttttttgtaggtaatttgattttttttttggttgtttttaatatttttggttttattttaattttggtgaatttgatgattatgtgttttggggttgttttttttgaggagtatttttgtggtgttttttgtattttttgaattggaatgttggtttgttgtgttaggttggggaaatttttttggataatattttgaagagtgttttttaatttggtttaattttttttgttatttttaggtatagggataattaaatataggtttggtttttttatatagttttttattttttggaggttttgtttgtttttttttatttttttttttttaattttgtttttatattttattttataaaggtgatttttaatttttgatatttttttttttgttttggttgttgatatttgtgtatgttttatgaagtttttgtgttgtgttttttagttttattaggttatttatgtttttttttaaattgtttattttaggtagtaatttttttaatttttttttaaggtttttagtttttt

SEQ ID NO: 204 - DNA, 5312 bp, Artificial Sequence
  chemically treated genomic DNA (Homo sapiens)
gttggttttgggggttgatgattttttgggtaggtgatgtgttttgtttaggttttattttttgtgtttgtaaaatggggtggataatgtagtttaaggtagagttgtgttaaggttttttgttgttgttgggttttggtggtttgattgggtttggggtttgagtgtgtttttgggtttgggggggttgttgtgatggatttgttggtagtgttttaggattgtttggtggagtagttgttgttgttgtggatttaggtttagaggtggtttaaggtgtgtgtgtggagagggtggaatgtgggtttgtgattttgtgggttttgggatttggtatggggtttttgtttttgtgtgttatggtttgttagtgtttaggtttagtttttttttttgtagtggttttgtaggtttgtggttttatggtggggtgatgtgttttgtttaggttttattttatgtgattttaaaatgtggtggagaatgtggttgtgggatttttttaggggttttaagggtttgtgggggttgggtgtttgggtgtgtgggtgggggaggtttggtgttgtggtttataaataggtgttgttttgttattgttgttgttgttgtttttgtggttggatttgggttaggtggggttttttgttttttggtattttttggaggggtgagtgttgaggtttttagtttttttggtttatggagggttttgagtgtgttttaggggttttaattttgttgttttttgtttgaggagggaggatattgtttgtgtttgttgtggtttgatatttttttatggaataaatatagtgttggtttttgtagagttttttttgggattggggttaggggtgtttttttttgttattattttgtttgtttttttatttttaggtttttgtttatgggttttttttttatttttgttaatgaaatgttttattttgggaattgtattttttgttgtttttttatattgtatttggtaagagatagggtattgggtttttggagaaatttttgtgtttttattttgttttattttgtttttaggatattgataagtagtatgtgggttttgttatattgtttaattaggtgtattgtaagttggtgaagaaaggttttgattttatatttatggtggttggtgagtgggttaggttttttgggggagtggttggggttattggttagttaagttttgttgttggagttttagatttaatgtagttttttttttgtatttgtgtgtaggtgagttaggtttggggaagtttatattggtttatagtttttttttgatagatttgtataaggattggaagttgtttagtgttgagggtgagtggtttttaggaggttttggtattgatttttagtttttttttatgggatttttttaaggatttttttttaggtttagtttttattgttttgtttttgtggtgtgggttttttgggggtagggttaaggtattaagatggatgaggatgagggttttggttgttaagggtgaggggttgagggttggagaggtttttttagtggttttttttttgtagagtgtattagttagatggtagagattttaaaatatatggtggatattgaggagaagggagttaagttgaagtttattattgtggatatgttgggatttggggatgttgttaataatattgagtggtgagtgaggtttgttgagaaaggttttgtttaggtggttatagtatttgaggtttggttttattttttttttgtttatagttggaagtttattattgattatgtggattagtagtttgagtagtatttttgtgatgagagtggttttaattgaaagaatatttaagataattgagtgtattgttgtttatattttatttttttttttgggtatgggtgtgtggttgttttggggttaggtttgggagtgtagtttttataatatggttttttggttgtgtttatgtttatttttggttgtttttggtaggttgtggttagtggatgtgggttttatgaaggtattgtatgagaaggttaatattgtgttttttattgttaaagttgattgttttgtttttagtgagatttggaagttgaaggagtgggtgagtttgttgttgtataggggtttggttagggttttggggttgagagtattagggggatttgtttggttttaaatttgatggtttttgttttattatagatttgggaggagattgataagtttgggatttatgtatattagttttttgagtgtgatttggatgaggatgaggattttaagtagtaggattgggaattgaaggtgaatatgtagattggtggggtaggggggatggagttggtgaggggtagaattagagggttttgttttttttatattgagtttgttggaggagggttaggttagtttagttgggtgtaagagttatttgttttaggagtagaggatttgtattttttttatttagggttagaaggtaaaggttattatgtttttgtttggttggggtgggttatgtgggttttgtgtggtgtttggtaggtatggagtatttgtttagatttagaggtgtagtagtgggttaggtttttaattttaattttttttttatgggttattagaggaaggggttgttttagtggtatattttggtttttagatttttgagttttagggttggtggttttgggtgttttggtagttagagtgatgatggagattatgttaggggtaggtggttattagggtaggggtattagtatggggagatataggtttagttttggggagggaaggggtagttggagggggtggtttttgatgagggaggagatgaggagggagtatgtttggttgggtatagtttggaaaggttttggaatgtgagttatatgggttttggttttagttaggggtagagaggttagaaaggggtaatgttaggatttttttgaggagagatagttgatggtgatgttggaggggtgttttgggagttatatgtttgttttttattagtaattgtgtaattatgtttattgggtgtgagttttttttttttttttttttaggagagtgtgttttttgttgttataggtagtaatatggtggtggaggttaaggggtagtgggtttggggttgattgtatttttgggggattgtggagggtgagtagagttttggggtattaggtttggtgggggaaggttgttttgggttggtgttagtttattatttatttttattttgtagtggagaattaggtgtattgtgattttgtgaagttgtgtaatatgtttatttgtatgtatatgtatgattttaaggatgtgatgtgtgatgtgtattatgagaattattgtgtgtattgtatttagtagatgattaggtgtgtgttttagttgtgagttagattttgtttttttggttttgtttatgtttttataattgagggttggttttgttagtttatttagatttgaattttgtattattttttaagtttttttttttttttagagtttggtttttttagaattaagtttagggttgtgagggttttggagggtagggttttagtagtggtggggatgggttaggtattgttagtttatgttgagttttttggtggtgttgttttgtttatttttttttttgttttgtgtagtaaattgatttaggatagttgtatggagagttttattttgattttgttgttgtttattttggatgttgagattgagaagtttattaggatgaaggatgaggaagtatgtggggtggtgggggtggtggaggtgggtgttagggatgtttttttgtggtgttgtttatttgttgggttgtttttgtttgtagttgaggtgtatgtaggagatgttgtagaggatgaagtagtagatgtaggattagtgatgtttgttgtggatatattgtttgtttttgggatgtttttgtatttttggatattagattggattgtttttgatttggagatgtggggttatagtttttagttgattttaatttatttttagtattatttttttttaggttattgtgtttgtttttgaggggtttggattgtagtttttgtttagttggttttttttgattttgggggattaggagtgaagttgggtgggattttagagatttgttttttttgttttttttttgtttttggatggttatagtatttaaattgtaggttttgttttggtaggtaggtaaagttaggtagaagaggatttttaggattttgggtttgttttttgttttagtgttgtagaatggatttgggagtttttttttgtttgtttttgtgggttatttagtgagtgttgagattttattttttgttgaggtgggttgagtttttttttatttttagatgtttagtgggtagggttgggttgaattaaatgggagttttttagatataaggaggttagaggttgtaaggagtggggttgtgattgtttatattttttttttatagtttggtttgatttggagggtttttggggtattgggtggtgagttattttttggtaatttttggtgttgttttttgtttttgtttgaggttttttttttttagtattgttgtggtgtgttgggattttgagtttaggttttttgatgtttttatttgtatgatttttttttgttatatgatgttttgtttttttttgttgtgaatgttgtgttttgttttggtgataggagaataatgttggtgaatgttgtagtgggtgtttgagtgttttgtgtgtttttgagagtgggtgggagtggaagtttgagtggtttgtggtttttggtgatagtgtgttatttgttgttgtagtgtgtgtttgtgtggtttttgggttatttttggttaggttgtagtattgtggttggtgtgggtgtggtaggggtggggtggttttattgtttggtttttttgtttatgttttttgttgtagagtaagttgggttgttgtttttttgttatgggttttggtgagtttggagtttggttgggtttttggttgttttttaggttgatttgggttgagaggagttttggttgtttggttgtagttgggagagatttgggttagatttagaggggatttttagttggtgtgtggggtggttagggtggagaggttggtgggttattgggatgttgggtattaggggttggatggagttgggttggtagtttgggtatttagagatgttgtttaggtgtttgttgattgtttggtttattgtggtgttttttttgtagg

SEQ ID NO: 205 - DNA, 5312 bp, Artificial Sequence
  chemically treated genomic DNA (Homo sapiens)
tttgtaagggaagtgttgtagtaagttgagtggttggtgggtatttgggtgatatttttgagtatttagattgttggtttggttttatttagtttttgatgtttggtgttttggtagtttgttagtttttttattttgattattttgtatgttggttggaagttttttttaagtttgatttaagttttttttagttgtagttaaatgattagagttttttttaatttgggttggtttagggagtagttgggggtttgattggattttagatttattggagtttatggtgagaagatggtagtttggtttattttgtagtgggaggtgtaggtgggagagttgagtgataaggttgttttgtttttgttatgtttgtattgattatagtgttgtggtttggttagaaatagtttagaggttgtgtggatgtgtgttgtagtggtagatagtatattattgttggaggttgtaggttgtttaggtttttgtttttatttgtttttaggggtatatggagtatttggatatttgttgtgatgtttattaatattgtttttttgttattaggataggatgtggtatttataatggaagaaaatggagtattgtgtggtgggaagggattatgtgggtgggaatattgggaggtttaggtttaggattttggtatattatagtggtgttggggagaagaggttttgagtgagggtaggggatggtattgagagttgttaggaggtggtttattgtttagtgttttgggggttttttaggttgggttgggttgtggagaaggggtgtaagtggttatgattttgttttttgtagtttttggtttttttatgtttggagggtttttatttgatttagtttaattttgtttgttaggtgtttggggataagggaagatttggtttgttttgatagaaaatggggttttagtatttgttgggtgatttgtgggagtaggtaaaggagggtttttaagtttgttttgtagtattggggtagggaatagatttaggattttgggaatttttttttgtttagttttgtttgtttgttagagtagggtttgtggtttgggtgttgtgattgtttgggggtgggggaagggtaagggaggtggatttttgaagttttgtttaattttgtttttgattttttaaggttagagagggttagttgggtgggggttatggtttaggttttttggaaatagatataatgatttgggagggggtggtgttgagaataaattagggttagttgggggttgtggttttgtgtttttgggttgggaatagtttggtttggtgtttaggggtgtgagggtgttttggagatggatggtgtgtttgtggtgagtgttattggttttgtatttgttgttttattttttgtagtattttttgtatgtgttttagttgtgggtggagataatttggtgggtgagtagtattgtggaggagtatttttgatgtttgtttttgttgtttttgttgttttatatatttttttattttttattttgataagttttttagttttggtgtttggggtgggtagtggtaggattgggatggggttttttatgtggttgttttgggttagtttgttgtgtggggtgggggggaggatgggtggggtggtgttattgggaggtttagtgtgggttggtgatgtttggtttatttttgttattgttgaggttttgttttttggagtttttatagttttggatttggttttagggagattaggttttgggggagggggggggtttagggaatggtgtaaagtttaagtttgggtgggttgataggattggtttttagttatggagatgtgggtggggttagaggggtgaggtttggtttgtggttggggtgtgtatttggttatttgttggatgtagtgtgtgtggtagtttttgtagtgtatgttgtatgttatgtttttgaggttgtgtatatgtgtgtggatgagtatgttgtgtagttttatgaagttgtaatgtgtttggttttttattgtggggtgggggtgggtagtgggttggtgttggtttaggatagtttttttttattagatttggtattttaagattttatttattttttatgattttttaggggtatagttggttttggatttgttgttttttggtttttattattgtgttgttgtttataatggtgaagggtgtgtttttttgggggaaggagggagaaaggtttatatttggtgagtgtaattgtatggttattgatgggaaatgggtatgtaatttttggggtatttttttagtattattattaattatttttttttaaagagattttggtgttgtttttttttggtttttttgtttttggttggagttagagtttatgtggtttatattttagggtttttttaggttatgtttaattaggtatgttttttttttatttttttttttattaagaattattttttttagttgttttttttttttttagggttgagtttatgtttttttatgttgatgtttttgttttggtggttatttgtttttggtatggtttttattattattttagttgttggggtatttaaagttattaattttggagtttagaaatttgggagttagggtgtgttattggggtagtttttttttttggtgatttatgggaagagggttggggttgggggtttggtttattgttgtatttttggatttgggtaagtgttttatatttgttaagtattatatggggtttatatgatttattttagttaggtaaagatatggtgatttttattttttagttttggatgaagggggtataggttttttatttttagaataaatgatttttgtatttaattgggttgatttggtttttttttagtaggtttaatgtgaaggagataaagttttttggttttgttttttattagttttattttttttgttttattagtttgtatgtttatttttagtttttggttttgttgtttgaagtttttatttttgtttgagttatatttagggaattggtatatatggattttaaatttgttaatttttttttggatttgtggtggggtaaggattattagatttgaggttagataagtttttttggtatttttagttttagggttttggttaggtttttgtgtgatggtaggtttatttgtttttttagtttttggattttattggggataagatagttagttttggtgatgagaggtatgatgttgatttttttatgtaatgtttttatgaaatttatatttattggttgtagtttgttgagagtagttaagggtgggtataggtatagttagggggttatattgtaggggttgtatttttgagtttggttttaggatagttatatatttatgtttgaagggggagatgaagtataggtagtagtgtatttggttgttttggatgtttttttggttgaggttgtttttattatggaagtattgtttaaattgttggtttatatagttggtgatgggtttttagttgtgggtaggagggaggtgaggttaggttttgagtgttgtggttgtttaggtaaggttttttttagtaggttttatttattatttggtgttgttgatagtgtttttgaattttggtgtgtttatgatggtgagttttagtttgatttttttttttttaatgtttattgtgtgttttagaatttttattgtttggttgatgtgttttatggggaaggggttattggaagggtttttttaatttttagttttttatttttggtagttaggatttttgtttttatttattttggtgttttggttttatttttaggggatttatattgtgagaatagaatagtgggagttggatttgaaagggagtttttggagaggttttatggaaggggattggggattagtgttagggttttttgggggttatttatttttagtattgagtagtttttggtttttgtataagtttgttaggaagaggttgtggattagtgtggatttttttaggtttgatttatttgtatataggtatagagaaggagttgtgttaggtttggggttttaatgatagagtttggttggttagtgattttagttatttttttgaggagtttggtttatttattagttattatgagtgtgaagttaaagtttttttttattgatttgtggtgtatttggttgggtagtgtggtgaagtttatgtattgtttgttaatgttttggggataggatggaatagggtagggatataaaggtttttttagaagtttaatattttgttttttattaaatgtggtatgaggagatagtagagggtatggtttttagggtggggtattttgttggtaaaaataaggggagggtttgtgggtaaaagtttggagataagaaggtaggtgaggtggtggtaggagaaggtatttttggttttaattttagggagggttttgtagggattgatattgtatttattttgtggggagatgttaggttgtagtaggtataggtgatgttttttttttttgggtagagggtagtaggattgggatttttgggatatatttaaggttttttataagttggagaagttgggggttttgatatttatttttttggagagtgttagggggtgggaggttttatttggtttggatttagttgtgggggtggtggtagtggtggtggtggagtagtgtttatttatagattgtggtgttgagttttttttgtttgtgtgtttaggtgtttagtttttgtagatttttggggtttttggaggggttttatggttgtattttttgttgtgttttggagttgtgtgaggtgaggtttggatagggtatgttgttttattgtggggttgtggatttgtgaggttgttgtggagggaagggttgagtttaggtgttggtgggttgtggtgtgtggggatggggattttatgttgagttttggagtttgtggggttatagatttatgttttgttttttttatatatgtattttgagttgtttttgggtttgggtttgtggtgatagtagttgttttattaggtggttttggggtgttgttagtgagtttattgtggtgatttttttaggtttgggggtatgtttggattttaggtttggttaggttgttagagtttggtgatagtgagggattttggtgtggttttgttttaggttgtgttgtttattttgttttgtggatgtgggaagtgaggtttggatagggtatgttgtttatttgggggattgttgatttttgaggttgat

SEQ ID NO: 206 - DNA, 3025 bp, Artificial Sequence
  chemically treated genomic DNA (Homo sapiens)
tttttatgatttgatttttatagttgttttatttatgggttttttataaattaggggtatagaggagtattgaaagttagtttagaggtgagtgtgtgtagttagtgttttttgtggatatagtagttgggtgttggagaggtttggaaagggtgtgttggagagttaagtgttagttgtttagggtttgttggttgttttttttttttttgtttggtaggggatttagtgtgtatgttagtgtggaggggtgggttggttggttagttttgggttttttggttattttggggattttttttaagttttgtttttgagtgtttttattggttttggatttttttttttttagttgtttgtttgggttttggggtgtttaggttattatggataaatagtttagggtgtttggttgagaagttaggggtgaggaagttttggggtgttgttgttgttttttttaattataaattaggttggataggagagggaggggtgggggatagtgggtggggatttagattgttagtattttgttatttatagttggggtttttgagtggtagaaagttttggttattttttgttgtttgggttgggtgaaagttaggattgtgttgtgttattgttaggatatggagttattgttgttattgttttgtgatgtagatttgatggtttttgatggttttttttgtttttttgttataatggatgatttttatgatgatttgtgttttgattttttggatttgtgtttttttgaagatttggatttgtgtttgatgtatgtgggtgtgtttttgaaatttgaagagtatttgtatttttttgtggtggtgtatttggttttgggtgtatgtgaggatgagtatgtgtgtgtgtttagtgggtattattaggtgggttgttgtttattgtgggtttgtaaggtgtgtaagtgtaagattattaatgttgattgttgtaaggttgttattatgtgtgagtggtgttgtttgagtaaagtaaatgaggtttttgagatatttaagtgttgtatgttgagtaatttaaattagtggttgtttaaggtggagattttgtgtaatgttatttgttatattgagggtttgtaggttttgttgtgtgattaggatgttgtgttttttggtgttgtagttgttttttatgtgttgggtttgttgtttttgggttgtggtggtgagtattatagtggtgattttgatgtgtttagtttgtgttttaattgttttgatggtatggtaaggttgggattttaggaagtgaggaagttagggtggtgtttgggatattagggatgtgtttttgagggtggggagttggttttgtgggaggtttgggttaggattttttttgagagagaggatttttttgttttgggtagttgttattggggtagtttgttttggaagtgtgtgggtaagtgtttgagttgttttattgggggtgttattagaatattgtagtgtgaatgtgaagatttttttttttatttatttttatttttaaaatgtaaatttgtgttttttggtgattgtttgtttttggtttggttttgtatgttgtagattttattttttatttatttgtaattatttttttaattaggataggtttgggtttggaattagagttttaggttagagttagggagggggtggttataggaattggtgtttgggttttgagttgttttgtgggtttgatttagttgtttttgttgtttgtagatggattatagtggttttttgagtggtgtttggtggtggaattgttatgaaggtgtttattataatgaggtgtttagtggtgggtattttgggtttttttttgtttgtttttttttttttatggagttgttttggtttttatttaggatgtttttatttttatttatatatgtttatgttttgggaagtggtgtaggagatgaaatattaagtaagtagttttttgtttttttgattgttttggattttaattaaagtttttagtttttaatttgttttaaagtattgggtttgggggtgggaggtttgttgtggttttatttttgtttattaattgagttttttttgtgtagaatttaggtttgggaagagtgtggtggtgttgagtttagattgtttgtttagtattgtggagtgtatttttattgagagttttgtggtgtttgtttttttgttggtggatgtgttttttgagttgtttttgtgtaggtaagaggttgttgtttttagtgagggagagagtagtggtgattttatttagttattggatgttgttttgtagtgttttgtgggtgtgaattttaatttgatatattaggtgttttgaggggatggtggttgtttatttgtttgagggatggtgtttttagggttttttgtgtttaaaagattgaatttaaatgttttttttttaatagtgttttaaaagtgattttttttgaggtaggagaggtgggagaattgaagtttttgtttttgttttatagggtaaggatatagtgtggttttttttatgtagtattttttttggagatttattgtgatggttgttttgtgttttttggtgggttagagttgaattttgaggggttaggtttagtttttttgtgtttttttttatgggggtgagatttttgtagatttaattttgttttgggatgtattggttatttgggggggtgtgagatttagtgtattttggttttaaatgtagtaggtgtaattgtaatttatttttaatttgttttttggtttaggattattttttgtaatatttttgtaatttatttttgtaaataagagttgttttgttagagtaggagtttttggggttgtatttatttttgaggtatggtgtgtggtgttatagggaatttgtatgtttatattgtaggtgggtgagttgtgggtgtttgtttaggtgattaaaataaaggtgttaatttatattgttgtggttttggttttttttggatatgggtgtgggattt

SEQ ID NO: 207 - DNA, 3025 bp, Artificial Sequence
  chemically treated genomic DNA (Homo sapiens)
ggattttatatttatgtttagggaaagttggagttatggtggtataaattagtgtttttattttgattatttgagtgagtgtttgtggtttgtttgtttgtggtataaatgtataaattttttgtagtattatatattatgttttagagataaatatagttttaggggtttttgttttggtaaagtaatttttatttataggaatagattataaaagtattataaaaagtggttttgaattgggaaatgggttgggggtgggttatggttatatttgttatatttgggattggagtgtattgggttttatgtttttttaaataattggtgtattttggggtagggttaggtttgtgagggttttatttttatgggggagggtgtgagaaagttgaatttagttttttaaggtttagttttggtttattgaggaatatggagtggttattgtaatgggtttttgagaagggtgttgtgtggaaaaaattgtgttgtgtttttgttttgtggggtgggggtggaaattttagtttttttgttttttttattttaagagaagttgtttttaaagtgttgttgggaggggggtatttaagtttaattttttgggtgtgagggattttaggggtattattttttgggtgggtgggtggttattatttttttagagtatttggtatattgggttggggtttgtatttgtagggtattgtggggtggtgtttggtgattgggtggggttgttgttgtttttttttttgttgggggtggtagttttttgtttgtgtggaggtgatttagaaggtatgtttgttagtaggagggtgggtgttgtagggtttttggtggagatgtgttttatgatgttggataggtagtttaggtttgatattgttgtattttttttgggtttgggttttgtgtggggagggtttggttagtaagtaggggtggggttgtgataagttttttatttttgggtttagtattttgagatagattggaaattgaggattttagttagagtttgggataattgaaaagatagggagttatttgtttagtattttattttttgtattattttttaggatataggtgtgtgtgagtgggggtgggagtgttttagatagaggttaggatagttttatgaaggaggaggagtgagtagggagaggtttggaatatttattgttgggtgttttgttgtagtaggtgtttttgtagtagttttgttgttgggtgttgtttggggggttgttgtagtttatttgtaaatagtaagggtgattgagttaggtttgtgggatggtttgaggtttgaatattaatttttgtagttgttttttttttaattttagtttaaggttttagttttgggtttagatttgttttggttgggggggtaattatgggtgggtaggagatgaggtttgtaatatgtagggttaaattaagggtggatagttattaaggggtgtaaatttatattttggaagtagggataagtagagaaaaagatttttatgtttgtgttgtagtgttttaatagtgtttttaatggggtagtttgaatgtttgtttgtatatttttaaaataggttattttagtgatagttgtttaggataagggggtttttttttttgggaaggattttggtttaaattttttgtaaggttagttttttgtttttggaaatgtgtttttgatattttgagtgttgttttaatttttttattttttggggttttggttttattatgttgttggagtagttggagtgtgggttggatgtgttggagttgttgttgtagtgtttgttgttgtggtttgggggtagtgggtttggtgtatagaaggtggttgtggtgttagggggtgtggtgttttggttgtgtagtagagtttgtaggtttttgatatagtggatggtgttgtgtaggatttttattttgggtaattgttggtttggattgtttgatgtgtagtgtttgagtgttttaaaggttttatttattttgtttaggtggtgttgtttgtgtatggtggtggttttgtggtggttggtgttggtggttttgtgtttgtatgttttgtaggtttatagtaggtagtggtttgtttggtggtgtttgttgggtgtgtgtatatgtttgtttttatgtgtgtttggggttgggtgtattgttgtggggaagtgtgagtgttttttgggttttaggagtgtgtttatgtgtattaggtgtgggtttaggtttttgaagaagtgtaggtttggggagttgaaatatgggttgttatagaagttgtttgttgtggtaaaggagtagagagagttgttgggggttgttaggtttatgttgtggagtggtggtgatagtagttttatattttggtggtggtgtggtatggttttggtttttgtttaatttaagtggtagagagtggttggaattttttgttgtttgggagttttggttgtagatagtaaagtgttggtagtttgaatttttatttattgttttttattttttttttttttgtttggtttgatttgtggttaaggaaagtggtggtagtgttttagggtttttttatttttagttttttggttaggtgttttgggttatttatttgtagtagtttaaatgttttggagtttaggtgggtagttgggggagggggagtttgaggttaataggaatatttgggggtggggtttggggggggtttttggggtggttgaggggtttgagattggttagttagtttgtttttttatattggtgtgtgtgttaggttttttattgggtagggagggagggagtgattggtaagttttaggtggttgatatttggttttttggtatgttttttttaaatttttttaatatttgattgttgtatttgtgggaaatgttggttgtgtgtgtttatttttgagttgatttttaatatttttttgtatttttgatttgtgggggatttatgggtagagtggttgtagaaattaggttgtgagag

SEQ ID NO: 208 - DNA, 11913 bp, Artificial Sequence
  chemically treated genomic DNA (Homo sapiens)
taaagtagggtgttattaaagaaagaaggaagaaattggttaaatgaatttagaatataaataaaattattgtataaataaaatttttgtttatgattaagttggaatggtggttaaaaaagaaaagggaaaaaaaatttttagatgtaggtagatttttataattaagttattttttaaaggggaagtaaatgtgatagaatatttagtaagtaaatttattgaggaatattttgtttttatataattaaatttaatattgaggtaaaattgataattattaaattgagggtagttgggagagggaaaggggatgagataaaatttagtttataaaatattttattattttttataggttaaaaaatataaaagaaatatttggaaagaattgtttaagatggaaagattttaagattgtgtgattttttttttttttttttttttttttttttttttataggtgtagaataatttttttttttttttttgtggttttttttttttttattttttttttttgttgtttgtaaagttgaatttggggttaggagttttaattgtaattttagattggaattttagatggtgtgtttaggattggaagtaatttttagtttattaattttatgggtttatgtatttgttttggttatggtttggtttttatttttattgtggtattaatgtagaataaattgagatatattttttatataattagttttagaatttaaaaagatttatggtataataatagaggtagtgttgtggaatttttttattgaggatttttggggagtttggggattattttgtggtggtattagaatagatgagtaattttagtggttttaggtattgtgaattgggggagagggggaaattttgtattgtatttggtagtatttaatggttttgggtttttagatagggttagtgaggagagttaggatagtaagtggggattggttaaaaaaaattgatttaattttgaaatgattagaagaagttgggagtagttattataaagttttttttttgtttttttttttttttaattgaaggaatgatgttgaaatttttattgttagtgtggggttgggaattattttaaatatttgttttgtagttttgagtgggtagattttgaagagttggagttggtggggaggggaggaatagttgttgggttgttttgtgtgtggggtttggggtgtgggttttggggagaggtgttagttgaaagtttgttttttttttgtgataggtagtagtgaggttgagttattttttattatggtttgtgggttttgtgtgtagtgtggttgtttttgtttttgattgattgtagtgttttggggtgtttatttagttgtttgtggttgttgggtgatttttggagggtggtttaggtgtgtgtattggtttttggggttgtggttgtagtagtttagttttgtgttttgttagatgtagtggatagtgttggggtgaaagtaagggttgagaaatttttattgttttgtttttatttagttttgatttttttatattgtaataattatgtatttttgaggttgggatgtttgtgttttgttagtgtattaatgttatatggttttttaggggttgtttttgtttttgtattttattagttttgaagaggtagaggggtggtgggtaaaatttttaattggatgttgagagatttgggttttagtttggtgttgttattaatttgttttttgtttttaaatagtagtagtaataaaaattgtaaagttgattgagttaaaggtttatattgtttttttatttaatttttagaataattttatgaggtgggtgttagtattttattattttgtttgattagtaaggaaattgaggtttagagagattgtggaatttgtttagggttatatagttgttggttatttggtagagttgaggttttattttggggttattaattttttgttttttattgttgtgttttatagattgttttttttttggttgtttgggttttagtttttttttttgtaaaatgagaagtttaatttgtagttttttttgttaattggtggtttagattaggaatttttgttatagattttggtgttgataggggtaagaaggtgggtgaaagaagggggtgtttagttttttatagtttgtttttttttgggattttgtgaagggtgggttttgtgagttaaaggaggtataggagagtgtttattgtttgtggtgggtgaaggtgttatttgtttttgtgttaggttgtgagttttggtgtttagtttagggtgttaaggttagtgtagttggtatgttttttttggaaaattttaggttttttgtagagaatgttatttataataaagaagaggatagagaggtatggagtgttttgtgattgtaggagtatgttagttttttagtgttggtttagtgttgtttgggtttttgggtatgtggatttgttggggttgtatggagattttttgttgggtttttggggttttttgattgtggttttttagtttagtattttttttttggttttgtaggttgtagggaattttttttatttttttagttggagaagtttaagttgggtgagggggtattttggggtttgtattggtgttttttttttttttgtttttataaggattttgagaaaataaatggtagaggagagaggagttttatatttgtttggtttttttttttttttatttatttttatattttttattttggggtaaaaatttatttttgaaaaatgttggtagagatttatgtgtttttgttttatttgggttttataaatataatgatttatatttaagttagtttttttttagataattttttttttttttgttaaaagtgttaaggatggtaaaagaagaaataattttaatttttttgtttggaaatgaaagtttttggttttttataaagggttttttgttttttatagttgagttttagttaagaaaaatgatttttaagtagaaataataggtggggagaaggaagggagatatagggatttggggggtttttagggtaattggtagtgaattttgttttgagagttttttttttatttaaaaaattaaatgtgtgagttttgtgaaaggtttagggatagattgtgtgggagaggattgagtagagagtgtgggggtagtgttttgtagaatttttttttttttaataataattttaaaagtttttgagtggagatgatgtaaagttaagtagtaaaggtggtttgggaggtaagtggagggtttaagtgttgtatttttatttttagggttttttgtgtttatgggatgtgtatttttaagaagtgtgttttttgagtaagttttgggtttgtatatattttgggtttgtagttagaatttaatggtgataatgtttatgtaatgtaagttaaaaattaaagtgtaaaaaattattatgttatttattgaaatgttattttttgttaaattgtaattattttgttttatataagtttggttggaaagtttgtagttttagtttgggttagttaggtataggaggttggattgtaattggttgttttttttttgttgtgtttggttgttttatgttgtgttgttgttgttgttttttggtgtttttgggattttatatgtatttttgaaatatgttttgttttggtttttggtttttttttttgtttaggggttgttttttaatagatattgatttttttagaagatttaaaaattaaattaaaatattttttatttgttttaaatatttgttttggggtgtgggggttgttaaatagagattagatgaagggagttagatttagtgaagttttttgagtttttaaagatttgaatattaatttgtgtttgtgggttgatggaggttttttttattttattttttggtttttttaattggtttttgttttttggttaattattgagtaattagaatggtatttttgattagggttataggtagtgtttggtggagtggttttaggagttatttgttttttgttgggttttgtatttaaatttttttttttattttttttttttaaattgggtgttaggatgttttggttggaatatatgtaggttttgggtgtttgtttaagggttttttttttttttaaattagttgttgtttttttggtttaattgtagaagaattagatattttttattggaaagggaaattaagtgttgttgattttaattttaggtaggtggtaattgttttttgtttggtgtaaattttattaagtaaataattattagttgattgaaatatgtttggtttataattggtgtaatttttggttatttaattgagggatgtttgtttttagttttgatttttggaatttataaagggttatttttttttttagtgattttaagattatggttatttttttatttgatagttttagaagtaagagttagatttaagggtgtaaagtaagggtatatgtttttttgaagtttgattgagttttttttgtgtttttttgaagtttttgtttttttggagtttatttgtttttttttttaaattatttttttagattaataattttatttttatttttattgtatttgattttgtttggatttattgtttatttgaatggattttttagtgagatgaggtttttatattggtgaaggttaagaaggggaggtggggggagggttgtgttatattggttagttgagagtgtgtgttgggttgaagaggagggtgtttttgagagggatgtttttttggatttgtttttattttagttgtgagggtgtttttaaggagtagtgtgtgttgtttggttgggtttgggttgttgagtgaatggagtggttgagttttttggtttttttttttttttgtgttgttggttttttttatttgagttttgggaagttgagggtagttaggtagttggggtaaggagtttaaggtagtgtttatatttgggggttttttgtaatttgattgtttgtttgtttttttattttttgtttttttttttatttatttatttatttatttatttatttagagttgggatggtagtttaggtgtttgggttttgttgtttttttgttgtgattttggatttttttttgttgtaggatttggtttttatgtgtgttttggagttggtgttttagtatatgttttgttttgggtttgggtgtttatagtagttagagtagtagggagtttgggatttgggtggtatttgggttaagttaggtgttgttgaggttagtgttgaatgtttttagggttggaggagttgtggggtgtttgggtttgagttgtagtaaatgggttttgatgtgtgggatttgaatgtgttgttgtttgttgttttttttttgggtggtggtggtggttgtgttttgtttgtgagtggtgtggtgtagtgggtgttggtgttggattttgtgtttttgggtgttttggtttatgggttgttgggtggttttgtgttgttattggttttgttgttatttttgttgttgttgttttatttttttattaaataggagttgagttggggtggtgtggagttgtatgaggagtagtgtttgagtgtttttattgtttatttttttggttagtttattggtatagttggagtttgttgttatgggttttttggtttttttttgtttagttaggtgttatttggttaggttaggatgttttttaatgtgttttatttgtttagttgttttgagagttagtttgttatttgtaattagggtaagtaggttggggagtgttttttatgtgtggggtagtggtgttagggattttttgttttaggatattttttttttttattttttttgattgtagtttttatttagttgttttttaagggttgtgaggatagtggaagtggtggttggggaggaggttggagagtgggagtgtatgtaggtattggtttttgatattttttaaagttaggtagagttaggagtttgattgtttgtaagagttgggagggtgtttggggttttttagagtttgagagattttgggattgttagtttttatgggagtggaattaggagattggtgtagtgtttggttttgttttggggagagttttgttaattaaggaaatgttaaattgttattaagtgtagtgttttttagatgtttggattttggatttggagtgggattagtgtgggggtgagtgtttgtgttgtgttgtttttgtagtgttaaaatgtttaggagtatttttagtttttataatatggtgttggtatatatttaggtgtatattaagtattgtagagaattagaatgagtatatgtatttttagtaattaaatggttttttggaatagtgttgtgtttgtggatagtttttgtgtatggtaatatagaagtggatttttattgggttttgtttaggtggtggttatgtaggttttggggatggaagagaatttgatttatttgagtttaagttatgtgggattaggttttattgtaggtagtggaaggaggtatgagttttggttttttttttagtgtatttggggtgtttttttattttgtaaatgtggggtttagttgggatagtatttttttaagatttggggttagaataaggatagggttatttgttgtgtttagttaggatataaggagggaatttggtatatgataagtattaggttggttttttattttgtgttgatgtttgtttattttttttttgtttgggtggtgtggatttgaatttgtggagtttttgtagtttgttttttttatttatttttagtggatttttatgttattgagaatttaagttagtttggtttgatttggtaatttagtaaatgttttattaatataatggtggatgttttttttggagtaaaattatttgagggtttagggattgggatgtttttggaatgtgtgggaagtagagtgtattttttgtaggaggtatttttgtttaaggtttgggagaagggttttgtttttgttgtttgtttttatttgtgttttttaaatgtgtgtttttaggttgtttttattttagtttaattaggagtatttggtttttgtgaagttttggagaaattgaaattgtttttttttttgggagaatttgggattattgttttgtggaggaattgtaagtagatttaagggttgtttttattttatgtttttagttagtgaaattagtgttttgtatttaaggggtgttgggataatttattggttgttgaggtttgtgttttttgattagattgtgttatttttgtttagtaggttggtgttatttttggggagtttttaggttttagtgtttttgtttataagaggatagttgagatgggtaatttggagattgggtttggtttgaagttatattttatagatgtagaagtgttatttattatttttttggggttttaaatatggaatttggtaatttatttaaatatttgtgattgagaaataatgaatttgagagtattgtttgtatgtgtgttatttggaggtggttgagaaattattgaatttatgtttttggggtataaaatattattatgttattatttttttagtatttttaggggatttttgaaatttgggttttgttgttttgtttgggttttttgtttagttttttttagggtaggtttggtgtttgggattttattatatgttgtggggggtgggattgtgggttttgtagttagtaggtattatatttttggaaaatatttggatttttttgtaatatataggtgtggttgttatggagaaaaagttaaaaggggattaggattagtaggtgaatgtattttttttttttattttggagaaaaagtttaatggagagagggttttagatttaagttatatagtttggaagtattatttttaggtttaagttttgttttgtagtgaaaatagatgggtttattttatttagtttttgaggtttattgggtagtttggatgtgagaagtgttttggttgttattttggagtgggtaagggtggtttttgagattttgggtttattttttggatttttagggtttttgttgtttttttaggaatgtagggtttggtttaagatttgggttgtgagaggtaagggtattaatttttaaaaatgtggaaatggttattagagtgttaaggttaaattttaggggagaggaattaaggttgtttttggatttttagggtagtttagttatggtgtataggtaggggtaattgttggtatttatttataattgtttaaaattttataagtatgtttatattttaaatttttaaatattatattttgtattttaattttgtaaatattaatttagtaaatattaattgtttatttggttaggtattgggttttgaatattaattaagataatggttttgagaatttttgtaagaagtttattagttaattttggagaggttttttgttttggatgaggaaatttaggttttatgagattaggtggtagaggtgggatttgaatttagattatgttagggtgtttttattttttttttagggattttggttttattgttgagatggattttttttggtttgtgggaggggtattaaatttttagtttatgtgtgggggttgatgggtttgtgagggtagatgtggggtgaggatttgagtagttttagattagatgtaaggtttaaggaggaggggaaaaaagtttgtttgggttggatgtggtggtttgaggtggttggattatttgaggttaggagtttgagattagtttggttaatatggtgaaattttgtttttattgaaaatataaaaaaaaaaattggttgggtttggtgatgggtgtttataattttagttatttgggaggttgaggtataagaattgtttgaatttgggaggttgaggttgaagtgagttgagattgtgttattgtattgtagtttgggtgatagagtgaaattttgttttggaaaaaaaaaaaaaaaaaagaggttgtttgttagtttattgattttgtagttttgtaggtttgtagaattttaaggtatgattaggtttgggattattaggttattttagggttaggtgtggaggtttgtgatgtttgagggttaaaggtttttttttttggttatataggagagggtattttgttgggggataggttttttttaattatagtgtagttgtagttattgtttttagttttttgagtatttttttggttgagtttgttgtttattttattttttagtttttatggtttggttaggttaggtggtttttggtttttttgtagttgttggtgggggaggagggtatagagtgtgttttgttttttagtgtatggttaaggttgtgttttttttttgggttgggattaattgtgggaaaggtgttattttggttatttgattttttttttttaaggtttgtataaggagtttttgaatatgttgttttttttagttggtagttttattttttttggtttttgtttttgtattttttgtgttaggttaagtgttgggtttagggatagtgtgttttaattaaatttgtgtttgataagtttttaattaaaagagatttttttttgttttgtaggtgtttttattattgttttttttggggggatttgaaggagagggtttgaggttggtttttgtttgttgaggtttgtgtgtttggtttgggaggaggtttaggagggtttgtgggttatgggtatttttgggtttgagttttggggtgtggatggatgttttgagagtgggtgttgtgatttgggatttatggtttttgttgggtatggatagttgtggagtagggttttgaggattgtgtagtgttttgggtttttgtttatttttgggtttaggaatggagaagggtttgtttagagaaaatttttttgtagtttttattttgtttttttttttttttttttttttttttttttttttttttttttttttttttttttttttgtgtttgtttttttttttttttttttttttttagtgtttttttagaaatttggtttttattttgggtaatagtgggtgttttgagttaaattttgtttgtaagtttatttataggttttaaagaaggttaggttttaggttttaaaaggaagtttgtggaagtttaaatgtgtttgtttatgtaggagagttaatggggttgggggttatttttgtttatttagtaggagagaaatggaggtttttgaggttatatgataaaagttagtggttttttaaatttttagtgtgtggtgttgagtagtgtgtgagatttaagtttggatttgtattatttgggagttaggatttgtttttttttttttttttttgtattttgttatattattttttaggtttatgtttttgttgttttagagaagttttttttttttttttttttttttttttttttttgggtggggggtggtggtgtgtgtgtatgagtgtttgtgtgtgttttgaaaatggaggtaatgatgttttgggttttgtttattggttgagttttgtttaagtttttggaggtattttggttaaatagtgtaagagtgggagaatgggtgttgtttgatttaatttatttttgagaattttgtgaagtttggagatttagggtagttttgggttaggaggatttgaggttgttggggtggttttgttaggattttataggagtagttttttttagttattgtgtttggattttaggttatagattttggaatttgtagaggaatgagattttatttttgggttttggggttaatgatgtatttttagttgaaggatttttttttttagaggtagtaatagttttttagaagtttgtggggtataagtttaaagtaatttaataataaaaattataaaagattatgttttttaattgaggttttatgtttttttttttattttgggggggggggggaatgttaggatttttttagggggaaattgaggtaaaggattgaagtattattatggagggaaagggagatatagtgttaggtatattttaaaggaaattggttgtttagtttggggagtgaggaagttggtttttatagtagtggttagggttggatttttgggtgtaaggtgggttttataggggggaggaggaggagagtgtagggttgttatttgaaggtttaattggaaggggtttttgtttttttttttattagtttttttttgggtgttatggtgttaggttgggtagttttagatagataatattatttggtaattattttttttatttttaagattaggttatttaattggttttgagtaattaatgaaagttggtgtgtgggtttttgatttatagtttggagttaatgtggggttagtttagtagatttattttgtttgtttgtgttgtttttgtggaagagttgtagtttatttttggggggtgaataattttttttgttgattaggtaatgagttttatatttaatttgttaggggtttgttgtagaagtggtagagattgtagaagattgtggtataaataaattgggaaaaagtgaggtgggggttttagttagaaaaggatggagaagtttgttttaaggttatatttagggatttgggttgtttttttgttgaaagttttggaggtttgtggggttggatttttttttgttgggggtttgaatgtggggtttagtgtatattttttttgtttgtggttggtttagatttattgttttgttttgtgagagtattgttgatattgtgtttttttttgttgtttttgtagg

SEQ ID NO: 209 - DNA, 11913 bp, Artificial Sequence
  chemically treated genomic DNA (Homo sapiens)
tttgtgggagtggtggagagaagtatagtgttagtggtgtttttgtaagatggggtagtgggtttgaattagttatgggtggggggggtgtgtgttgaattttgtatttggatttttagtggaggagaatttagttttataagtttttaggatttttggtaggaagatggtttaagtttttggatgtgattttgggataggtttttttatttttttttgattaaaatttttattttgtttttttttaatttatttatgttgtagttttttatggtttttgttgtttttgtagtgaatttttggtaaattaagtataaaatttgttgtttgattgatagagaaggttgtttattttttaaaaataaattgtagtttttttgtaggagtagtgtgggtaagtgaaatgaatttgttgggttaattttgtgttgattttgagttgtaaattaggggtttgtgtattaatttttattaattatttggagttagttaaatggtttggttttaaaaatgggaagagtaattattgagtaatgttatttgtttggggttatttgatttgatattatgatatttaagggaaagttggtgagggggaaaataagggttttttttagttgggtttttagatggtgattttgtgttttttttttttttttttttatgggatttattttgtgtttaggggtttgattttgattattgttgtaggagttaatttttttattttttaggttggataattaattttttttagagtgtgtttgatattgtatttttttttttttttatggtagtgttttggttttttgttttagtttttttttagggaaattttagtatttttttttttttttaaagtgagaaaaagagtgtggagttttagttggaaaatatagttttttataatttttgttattaaattgttttaaatttatattttataagtttttggaaagttgttgttgtttttggggaaaaggattttttggttaaagatatgttattggttttggaatttaaggatggggttttatttttttataagttttggagtttgtggtttgaagtttagatataatggttaaggagagttgtttttatgggattttggtagggttattttagtagttttagatttttttggtttaggattgttttgggtttttaaattttataaaatttttaggagtaaattgggttaaatagtatttatttttttatttttgtattatttgattaaagtgtttttaaagatttaagtaggatttagttgatgagtaggatttagggtattgttatttttatttttgaaatatatatggatgtttatgtatatatattattattttttgtttagaaaaaaaaaaaaagaaaaagaaaaaaaaaaagtttttttggggtaatagaggtatgagtttggagggtggtgtggtagagtgtaagggagggaaggagggggtaaattttaatttttggatagtataggtttaggtttaagttttatatattgtttagtattatatattggggatttgagaagttattagtttttattatatgattttgagggtttttattttttttttgttaagtgggtaaagataatttttggttttgttagtttttttgtatgggtgagtatgtttgggtttttatagatttttttttgaaatttgaggtttggttttttttgaggtttatagatgagtttataaatgaaatttggtttagggtatttattattgtttggagtgaaggttgaatttttgaaaggatattaaaaagagagagagagaaagagagatagatatagagagagagagagagagggagggagagagagagagagagagagagagagagagagagatgaaatagaagttatgaagaagttttttttagatgaatttttttttatttttgagtttaggagtaggtagggatttagggtattgtataatttttagagttttgttttgtaattgtttgtgtttggtgagggttgtgggttttgagttgtggtatttatttttgagatgtttgtttgtattttagaatttgggtttaaggatgtttgtggtttgtgagtttttttaggtttttttttagattggatatgtagattttggtgggtaaagattggttttaaatttttttttttaggtttttttgggaggggtagtggtgaaagtgtttgtggagtggagggaggttttttttaattagaagtttattggatatgggtttgattagagtgtgttgtttttgggtttagtgtttggtttggtgtggagagtgtgggggtaggggttaggggaggtaaagttgttggttggaaggagtagtgtgtttaaaggttttttgtataggttttggagggagagaattgagtggttaaggtagtgttttttttatggttagttttggtttgggaggggagtgtaattttgattgtgtgttaagaggtgagatgtgttttgtgttttttttttttgttggtggttgtagagaagttgggaattgtttggtttggttgggttgtgagagttgaggggtgaaatggatagtaggtttagttaggaaggtgtttagaaggttgaaaatgatgattgtagttgtattgtgattggggaaaatttgttttttaataaaatatttttttttgtgtgattggaagagggagtttttggtttttgggtgttgtaggtttttgtatttgattttagggtggtttgatgattttaggtttaattatgttttagggttttgtgagtttgtggggttgtgggattagtggattagtaggtaattttttttttttttttttttttttgagatggagttttgttttgttgtttaggttgtagtgtagtggtgtgattttagtttattttaattttagttttttgggtttaaatgatttttgtgttttagttttttgagtagttgggattataggtgtttgttattaagtttggttaatttttttttttgtatttttagtagagatagggttttattgtgttggttaggttggttttaaatttttgattttaggtgatttaattgttttgagttattgtgtttggtttaagtaagtttttttttttttttttttaagttttgtatttagtttggggttatttaagtttttattttatatttgtttttataaatttgttaatttttatatatggattaagagtttggtgttttttttgtaggttagaagaaatttattttaatggtggggttaagatttttggaaaaggagtagaaatattttagtatggtttgggtttaaattttatttttgttatttaattttatagaatttggatttttttatttaaaataaggggtttttttaggattagttggtgagttttttgtaaaggtttttgaggttattgttttaattaatatttagaatttagtgtttgattaagtaggtgattgatgtttgttaaattaatgtttataagattaggatgtaagatataatatttaagaatttaaaatatgaatatgtttgtgaagttttgggtggttgtgagtgggtattaataattgtttttgtttgtgtattatggttagattgttttagggatttagagatggttttgattttttttttttggggtttggttttggtgttttgatggttatttttatatttttgagagttgatgtttttgttttttatagtttaagttttgggttaggttttgtatttttggggaagtagtaggaattttggaaatttaaagaataaatttagaattttgagggttatttttgtttattttaggatagtagttggagtgttttttatatttaagttgtttaatgagttttaagggttgggtaagatggatttatttgtttttattgtaagataaaatttaaatttggagatggtgtttttaggttatatgatttgaatttagggttttttttttattgggttttttttttagggtggagaagaaggatatatttatttattagttttggtttttttttaattttttttttatggtagttatgtttgtatattatagaagaatttagatattttttagaagtgtaatgtttgttggttgtaaaatttatagttttattttttatgatatgtgataagattttaggtattagatttgttttgaaaagggttggataagggatttaaatgaagtgatagaatttaggttttaaaaattttttagaagtattaaaaagataatggtgtagtagtattttgtgttttaggggtatggatttgatggttttttaattgtttttaaatagtatatatgtagatagtgtttttggatttattgttttttagttatagatgtttagatgggttgttgagttttatatttaaagttttaagagggtggtgggtagtgtttttgtatttatggagtataattttaagttggatttaatttttaggttgtttattttagttgtttttttatagatggggatattgagatttagaaattttttaaaagtaatattagtttgttaaataaaggtggtgtgatttgattaaagaatataagttttagtgattagtaagttgttttaatgttttttgagtataaaatattaattttattaattaaaagtatagagtggaggtaatttttgggtttgtttgtggtttttttataggatagtgattttagatttttttgaagaaaagggtggttttgatttttttaaggttttgtgggggttgggtgtttttggttaggttaaggtaggagtggtttgaagatgtgtgtttagaaggtgtgggtgaaggtgggtaataagggtagagttttttttttgagttttgggtgaaggtattttttgtaaaagatatattttgttttttatgtattttaaaaatattttggtttttaggtttttgagtaattttgttttaggaaaagtatttgttattgtattagtaaagtgtttattaaattattgaattaaattgaattggtttaggtttttaatagtgtggaaatttattgaaaataaatgaagagggtaaattataggggttttgtaggtttgggtttgtgttgtttaggtgaaagagaggtgggtgggtattggtgtgggatgagaaattaatttgatatttattgtgtgttgagttttttttttgtattttgattaagtatagtgaataattttgtttttgttttaattttaggttttgaagaaatattgttttagttgagttttgtgtttataagatgaagaggtgttttagatgtgttgaaagaaaggttaaagtttgtgtttttttttattgtttgtggtagaatttggttttgtatagtttggatttggataagttaagtttttttttatttttagaatttgtgtggttgttgtttgagtgaagtttagtgaagatttatttttgtattattatatgtgggagttatttatggatatgatgttgttttagaaagttatttagttattggaggtgtatgtgtttattttagttttttatgatatttaatgtgtatttaagtgtgtgttaatattgtattataagggttggaggtgtttttggatattttagtgttgtggaggtagtatagtataggtgtttatttttgtgttggttttattttgaatttagagtttagatgtttgaaaagtgttatgtttggtgataatttggtgtttttttaattaataaaattttttttaaggtagagttagatattgtgttggttttttggttttatttttgtggggattagtagttttggaattttttggattttaaggggttttagatgtttttttggtttttgtgaatagttaggtttttagttttgtttggttttggaggatgttgggggttagtgtttgtgtgtatttttattttttggttttttttttagttgttgtttttgttatttttatggtttttgggaagtagttgggtaagagttgtggttaaaaggggtaggagaggggggtgttttagagtggagagtttttggtgttattgttttgtgtgtagggggtgttttttggtttatttattttgattgtgaatagtgggttggtttttgaggtagttgggtaggtagggtgtgttaggaaatattttggtttggttggatgatgtttggttgggtggaggaggattgaagggtttgtagtgataggttttggttgtgttagtgaattggttggaaaagtggatagtgaaggtgtttaggtattgttttttgtgtggttttgtgttgttttagtttggtttttgtttgatgaaggagtgaggtggtggtggtgggggtggtggtggagttggtggtggtgtggggttgtttaatgatttgtaagttgaagtgtttgggggtgtaaagtttagtattggtgtttattgtgttgtgttgtttataggtagggtatagttgttgttgttatttagggaggggatggtgggtagtagtgtgtttaggttttgtatgttggagtttatttgttgtggtttagatttggatgttttgtggtttttttggttttggagatgtttagtgttggttttggtggtgtttaatttggtttagatgttgtttgggttttggattttttgttgttttggttgttgtaggtatttaggtttggagtggagtgtgtgttgagatgttggttttgggatatatgtggaagttgggttttgtagtaagaggaagtttaggattgtggtgaggagatggtggggtttgggtgtttgggttgttgttttggttttgggtgggtgggtgggtgaatgagtaggtgggagggagggtgggaagtgggggagtggataggtggttgggttgtggagagtttttgggtgtgggtgttgttttgaattttttattttagttgtttggttgtttttagttttttaaagtttaaataagaggggttggtggtgtggggaagaggaggagttaggaggtttggttgttttatttatttagtagtttaagtttggttaggtagtgtgtgttgttttttgggggtgtttttgtagttggggtgagggtgggtttgagggagtgttttttttggagatatttttttttttaatttaatatgtgtttttagttggttggtgtggtataattttttttttattttttttttttggtttttgttagtgtgggagttttgttttattggagagtttgtttaggtaagtagtgagtttgggtagggttgaatgtggtgggagtagagatggggttgttaatttaaaagagtggtttggagggaggggtaggtaggttttaagagggtgggaattttaggaaagtgtagaaagaatttagttaagttttaaagaagtgtatatttttgttttgtatttttgagtttggtttttgtttttagaattgttgggtaggggagtggttatgattttggggttattggggaaagaggtggttttttgtgggttttagaggttgggattgaaagtgaatgttttttagttgggtggttgggagttgtattagttataagttgggtgtattttgattggttagtagttgtttatttggtgaggtttgtgttaggtggaaggtggttgttgtttatttaaaattggagttagtagtatttagtttttttttttagtgaggaatatttaatttttttatggttaagttgggaaaatagtggttagtttaggagggaagaaaatttttgggtaaatgtttaaagtttgtgtatattttggttggagtattttggtgtttagtttggggaggaggggtgaaggggagggtttggatatgaagtttggtagggagtgggtaatttttggagttattttgttgagtattgtttgtggttttggttgaggatattattttggttgtttagtgattgattaggaggtggaagttagttaaggggattaaggagtggagtagggagaatttttattggtttatgggtgtgagttagtgtttgaatttttgggagtttgaagagttttgttaaatttgattttttttgtttagtttttgtttggtagtttttgtgttttagagtaggtgtttggggtgggtagggggtgttttggtttggtttttggattttttaaaggagttagtatttattgggaaataatttttaggtaaggagaagaattgggggttggagtggagtgtgttttagaggtgtgtataaaattttaggggtgttaggaggtagtagtgatggtgtagtgtgggatggttaggtgtgatgggagggaagtaattggttgtagtttggttttttgtatttggttggtttgggttggggttgtaagttttttagttaaatttatgtgaagtaaagtagttgtagtttgataaagaatggtgttttaataaatgatatagtaattttttatgttttggtttttagtttgtattgtataaatgttgttgttattaaattttggttgtggatttgaagtgtgtgtgggtttaggatttatttgaagggtgtattttttgggaatgtgtattttgtaggtgtaggagattttgagggtaaagatgtggtatttgagttttttgtttgttttttaggttatttttgttgtttgattttgtgttgtttttatttagaagtttttaaaattattattaagaaaagaaagattttataagatattgtttttatgttttttgtttagtttttttttatatgatttatttttaaattttttgtggggtttgtgtgtttggttttttgagtggagaaaggatttttgagataaaatttattgttagttgttttaagaattttttagatttttgtattttttttttttttttttgtttattatttttatttggaagttgttttttttaattaggatttaattgtgaggggtgaggagttttttatgaaaagttggggatttttatttttaaatgaaaagattgagattgtttttttttttattatttttggtatttttagtggggggagaggaggttatttgaagggaggttggtttgaatgtgagttgttgtgtttgtgaaatttaggtaaggtaaagatatgtaaatttttgttaatattttttaaaaataagtttttgttttggggtgagggatgtaggggtggataggaggaaaggagagttaagtaaatgtagaattttttttttttttgttatttatttttttagaatttttgtgggggtggggaggggaagagtattggtgtgaattttggggtgtttttttgtttgatttggatttttttgattaaagaggtgggaggagttttttgtagtttgtggggttaagaagaaagtgttaagttgaggagttgtagttggaggattttagggatttgataggaagtttttgtatgattttaatggatttatatgtttggaagtttaggtgatattaagttagtgttggggaattgatgtatttttgtagttgtagggtgttttatgtttttttgtttttttttttgttgtgggtaatgttttttgtgggagatttgaggttttttaagggggatatgttagttatattggttttggtgttttgagttaagtattaggatttatagtttagtatgaaggtaggtagtatttttatttgttgtggatgataggtgtttttttgtattttttttagtttgtgaggtttgttttttgtgaggttttagagaaaagtaggttgtggaaaattgggtgttttttttttttatttatttttttatttttgttagtgttgagatttgtagtagaggtttttggtttgaattattgattggtaaagaaagttgtagattaaattttttgttttatagagaaggaaattgaggtttagatagttgaaggagaggtagtttatggagtgtagtggtaaagagtaaggggttggtggttttagaatggaattttagttttgttaggtaattaatagttgtgtgattttagatgagttttgtagtttttttgagttttagtttttttattggttaaatgggataatgggatattagtgtttattttatagagttgttttgaggattagataggagagtagtgtgggtttttgatttaattaattttatagtttttgttattattattgtttaaggataggaaataagttagtggtaatgttgagttgaaatttgggttttttaatgtttagttggaggttttatttattatttttttatttttttagagttaatgggatgtagaggtgaggatagtttttggaaaattatgtggtgttgatatattggtaaagtgtaggtattttggttttgaaggtgtataattattgtaatatgaaaaaattgaggttgggtaggagtagggtagtgaggattttttaatttttatttttattttggtgttgtttattgtatttgatagagtgtggagttgggttgttatagttgtaattttagggattagtgtgtatgtttgggttgttttttgggagttatttagtggttgtggataattgaataaatattttaaagtgttgtggttggttaagggtggggatagttatattgtgtgtggggtttgtaggttgtaataaagagtggtttgattttgttgttgtttgttgtgggagaggaataagtttttgattagtgtttttttttggggtttgtgttttgagttttatgtgtaagatagtttaatagttgttttttttttttttgttgattttaattttttggaatttgtttatttggggttgtagggtaagtgtttaggatggtttttagttttgtgttggtggtgaaaattttaatgttatttttttaattaaaaaaaggggggggtaagggaggggttttgtgataattatttttagttttttttgattattttaaaattaagttgattttttttaattagtttttatttattgttttaattttttttgttgattttatttgggagtttggaattgttaggtattgttgaatgtggtgtaaaattttttttttttttttagtttgtagtgtttggagttgttggggttatttgtttgttttgatgttattgtgagatggtttttgagttttttgagagtttttagtgaaaggattttgtggtattgtttttattattatattgtaaatttttttaaattttggaattaattatatagaggatatgttttaatttgttttgtattaatgttatagtggggatggaggttaggttgtggttagagtagatatgtaggtttatgaaattgatgaattgagagttgtttttagttttgagtgtattatttggaattttagtttgaggttataattagaatttttgattttagatttaattttgtaaataataggggaaaaaaatggggaaaagaaaaattatgagagagggaaaaaaaattattttgtatttgtaaaaaaaaaaaaaaaaaaaaaaaaaaaaaaaaagttatataattttaaaatttttttgttttagataattttttttaagtattttttttgtgttttttaatttataaaagataatggaatgttttatagattggattttattttatttttttttttttttttaattgtttttagtttaatagttgttagttttattttagtgttgaatttaattatataggaataaaatattttttagtaaatttgtttgttaaatattttgttatatttattttttttttgagaaatggtttaattatagaaatttatttgtatttaggaattttttttttttttttttttttgattgttattttagtttaattgtaagtagagattttatttgtgtagtaattttatttgtgttttaaatttgtttagttaattttttttttttttttttagtaatattttgtttta

SEQ ID NO: 210 - DNA, 4316 bp, Artificial Sequence
  chemically treated genomic DNA (Homo sapiens)
ttgtagttaataaaaaaaaaaaaagaaagaaagaaattggtttttgttttattttatatgtttaggtataatttttttagagaagaagaggaggggggtggggaggagtaggaggaggaggaaagaaggaggagaaggagaaggagaagaagaggaagaggaagaggaagaagaagaagaagaagaagaggaagaggaagaggaagaagaagaagaagaagaagaagaagaagaagaagaagaagaagaagaagaagaagaagaagaagaggaagaagaggaagaagaagaaattgtttttagatttttatttttaggataagtttattgtttggtattaagttttttggggtgaatttttttttaaaagagtttggggagtttaggtatggaatgggaggtagaaagtttaattaagggattgggattttggaatgaataatgaagggagatggattgggtttatgttgaaggtttttttttggttttttagtttttgggtgaagatttagggagatattgagatatattttgtataggagggggagggggagggggagggtaaagttttagggttttaggagtggtttttaagggtttaggttttgaggtggtgtttggggttggaaggtttagtattgagaattttttatttttttagagttttttttttttttttaatttgtgttaggttttttattttggatatttataatgtggttttattttttatttttattgggtgttgtgtttttagagaagttaattagtgttgttgtagtttttaggttttaaagttttatgtattttgtgggatttatattttttttagatgtggaggttggggttatggtgttttgaagtttttttttgttgtttttaggggttttggttttgattgatatttgggtgggtgagtgtggggtttagagagaaatggtttttgtggggaggagtgaggggtttgtttggtgggggtgtaggatttagggagttgtgtttggaggagggtttggtgggttttattttttttttgtttttaggtttttattttttgaggtattttagtattgttgtgttgtggtttggttgtggggagttttgttatattgttgtggagtatgtagatgatatgtaatttttgtggtttgatagtgatgttgtgattttgaggatggagttgtgggagttgtgggtggagtaagaggggttgtagtattgggagtggattatagggtatgttaaggttaatgtatagattgattgagtggttttgaggaatttgttttgttgttataattagagtgaggttggtgagtgaatttggttgggggtgtaggttatgattattttttatttgttatggattgtttgggtttttttgagtttttggatttgaaatttattttgaggtagtggatttgtttagattttttatttgggagagttttaggtgtttttattgaggtttatttttagtttaggttaaaatttttgtgggttgggtggggagggggtggggttagttgggtggggttgattgtggggattggttagggttttatattttttagggaatgaatggttgtgatatggggtttgatggatgttttttttgtgggtattattagtatgtgtatgatggtaaggattatatttttttgaatgaggatttgtgtttttggattgtggtggatattgtggtttagattatttagtgtttttatgaggtagaggaatatgtagaggagtttaggatttatttggagggtgagtgtttggagttgttttgtagatatttggagaatgggaaggagatgttatagtgtgtaggtattaggggttatgggtgttttttttattttttgtagattttttgggatggttttgtataaggttgggaggaaagtgggtttaatgttaggatattgttttttttttagttttgagtaggaagaatttttttggtttttgagatttggtattagagagtgattgtgagagtttgttttgttttttgggataattaagggatgaaatttttgagggaatggagggaagatagtttttggaatattgatttgtggttttttttgagttttttaatagttttgggttttgtgattttttttttaagttttgttttttgttttatatttaatgtgtttggggttttgattttagttttttggtttttatttaggttagggttagaagtttttgttttttatttagagatttgaattttttaaggaataggagatttttttaggtgtttgtgtttaggttggtgtttgggttttgtgtttttttttttattttaggtgttttgtttatttttaggttggttatatgggtgttgttggggttttttatgaggagtgtaaagtgtttgaattttttgattttttttagattttttaaaggtatatgttgtttattattttatttttgattatgaggttattttgaggtgttgggttttgggtttttattttgtggagattatgttgatttggtagtgggatggggaggaatagatttaggatatagagtttgtggagattaggtttgtaggggatggaattttttagaagtgggttgttgtggtggtgttttttggagaggaatagagatatatatgttatgtgtagtatgaggggttgttttagttttttattttgagatggggtaaggagggagatgggtaaagaggggaatgaggggttatgtttttttttagggaaagtaggagtttttttggagttttttagtagggttagggttgaggtttggagattagggttttttatttttttttttttttttagagtagtttttttagtttattatttttattgtgggtattgttgttggttttgttgtttttggagttgtggttattggagttgtggttgttgttgtgatgtggaggaagaagagtttaggtaggaaggggtgaggagtggagtttgagtttttttgttttattgggggttgtaagttttaagtagaagtgtgttttgttttattattgggaagtattatttatatttatgggtttatttagtttgggttttgtgtgttagtatttatttatttgtaaagtttttgtgaaaatgaaggatagattttttattttgatgattatggtggtgatgggatttgattttagtagttataaattataggggaaggtttttgttgatgatagattttaggagggtagttggtttaggatttatatttgttttttttatattttttgattttgttttggatttatagttatatttttttggaaatttttttgggattaaagattaggggtttgttttaggattttatggttttgttttttttttggttttttataggatattttttttttatagatagaaatagagggagttatttttaggttgtaggtaagatgaaggaggttgatttttgagattgttgggatattgtggttaggagtttatgagggagtttatttattttatagtttttttagttatatttgtgggttttgattaggttttgtttttgttttattttaattattgatagtgtttagggttttggggtgttttttatagttaataaaggtgatattttagggtaggggttttgatgtgagtggggtgttgggggggaatagaggggatttagttgtgttattgggtttttttgatttggatgttttgagtatgaaatgggttatttagagtgttattttttattgtgattgatatgaatttgtttatgaatattttttttatagtgtgagatagtttttttgtgtgggattgagaagtaagatattaatgtagtagaattgtatttgtgttttatgaatatatataaattttaaaaataaagaataaaaatatatttttttatagatataggtagatatgtttttatagtatgtatgtaaatgtgtgtgtgtgtgtgtgtgtgtgaagagaaagagtgaatagagagattaagatttttttaatggtgaaaagatatatatatatttggaattagttagtttgatttagtttaggtgattttaattttggtggtaataattaaagtattgtagttaggagttagttgaatatatgtttttttttttttattagattgaattagagtgttgattttggttatattaatgttataaatttttttatagtttgtttgatttggtgtttgttggttttaatatttatagtgaatataagtaggttgttgttttttattttttttatagtttatttagtggttagtggaaatttgatgataatatggtggttaagttt

SEQ ID NO: 211 - DNA, 4316 bp, Artificial Sequence
  chemically treated genomic DNA (Homo sapiens)
aagtttgattattatgttattattaagtttttgttgattattgagtaggttgtgaagaagatagaaaataatagtttatttgtgtttattgtggatgttaaagttaataagtattagattaaataggttgtgaagaagtttgtgatattgatgtggttaaagttaatattttgatttagtttgatggagagaggaaggtatatgtttgattggtttttgattatgatgttttggttgttgttattaaaattgggattatttaaattgagttaagttggttaattttaaatatatgtatatttttttattattaaaagaattttaatttttttatttattttttttttttatatatatatatatatatatatatttatgtgtatgttataaaaatatatttatttgtatttataaaaagatatatttttattttttatttttaaaatttatgtatgtttgtgaggtataagtgtaattttgttatattgatattttgttttttagttttatataaggaagttgttttatattatagagaaaatatttatgaataaatttgtattagttatagtgagaggtaatattttaaatagtttattttatgtttaagatatttaagttaaagaaatttaatagtatagttgagttttttttgtttttttttaatattttatttatattagggtttttgttttggagtgttatttttattagttgtgagagatattttagagttttgggtattgttagtgattggggtagaataaaaataggatttggttagagtttatagatgtggttagaggaattgtggggtgggtgagtttttttataggtttttgattataatattttaataattttagggattagttttttttattttatttgtagtttgagagtagttttttttgtttttatttatgggaagaaaatgttttgtgagaggttagaaaggaggtagggttataaggttttagagtaaatttttagtttttgattttagagaagtttttagaaaagtgtaattgtagatttagggtaggattaagaaatatgaagaaagtagatgtgggttttggattaattgtttttttgaggtttgttattagtagggatttttttttgtgatttgtgattgttgggattaggttttattattattataattattgaagtgaagaatttgttttttatttttataggagttttataaatgagtaggtgttggtatatagggtttaggttgggtagatttatgagtgtggatggtgttttttagtaatgaggtagggtatatttttatttggggtttgtaatttttagtgggataagaaaatttagattttattttttatttttttttatttgagtttttttttttttatattatagtagtgattatagttttagtgattatagttttaaggataataaggttagtaatgatgtttatgatggggatggtgggttggggagattgttttgggaaaggaagggaaggtgaggggttttgatttttaggttttagttttgattttgttgaagagttttagaagggtttttgttttttttgagaaaagatatgattttttgtttttttttttatttatttttttttttattttattttaggatgaggggttggggtagttttttgtgttgtatatggtatgtgtatttttgtttttttttagaaggtattattatagtggtttatttttggaaggttttattttttgtaggtttggtttttataagttttgtgttttgggtttgtttttttttattttgttgttaggttagtgtgatttttgtagggtagaagtttagggtttagtattttagggtggttttatggttagagatggggtggtgggtaatgtgtgtttttggaggatttgagaagagttagaaaatttaggtattttgtattttttatgggaaattttagtagtatttatgtgattaatttgagaatggataggatatttggggtggggaagggagtatagaatttagatattagtttggatatagatatttgggaaaattttttattttttggaaagtttgagtttttgagtggggagtagggatttttggttttgatttaagtggaggttgagggattggaattagagttttaaatatattgagtgtgaggtagagaataaaatttgagagaaaagttatggggtttaaggttgttggagggtttaaaggggattgtggattggtattttagggattgttttttttttatttttttagagattttattttttaattgttttagagagtagggtggatttttatagttattttttggtattggattttgaaagttaggaagattttttttatttaggattagagggagggtgatattttagtattgggtttattttttttttaattttgtgtgaggttattttaagagatttataggagatagggaaggtgtttatggtttttggtatttgtgtgttgtagtgttttttttttattttttaagtatttgtggagtaattttaggtatttgttttttaggtaggttttgaatttttttgtatatttttttgttttatagaagtgttgggtgatttgagttatggtgtttgttgtggtttaggagtgtaggtttttgtttagggagatgtaatttttgttgttgtatgtgtgttggtgatatttgtggaggaggtgtttgttgggttttatgttgtagttatttattttttggagggtgtgagattttagttggtttttgtagttagttttgtttagttagttttgttttttttttgtttaatttgtggggattttggtttaaattgaaaatgaattttggtaaaggtgtttgggatttttttgggtggagggtttgggtgggtttgttgttttggggtagattttggatttggagatttggggggatttgggtggtttgtggtggatggggggtggttgtgatttgtgtttttggttgggtttatttattagttttgttttggttgtagtggtggagtaggttttttagggttatttggttagtttgtgtgttggttttggtgtattttgtggtttatttttaatattgtggttttttttgttttatttatggtttttgtggttttatttttggaattgtggtgttgttgttgaattgtaggaattgtgtgttgtttatgtattttatggtgatgtagtggggttttttgtggttgggttgtgatatagtggtgttgaaatattttaaggagtgggagtttgggggtgaggagggggtgagatttgttagatttttttttgggtgtggttttttgagttttgtgtttttattgggtgggttttttatttttttttatagaggttgtttttttttggattttgtatttatttgtttaagtattggttagggttagggtttttgagagtagtaggaggaggttttggggtgttatgattttaatttttgtgtttgggaaaaatatgagttttgtggggtgtgtgggattttagaatttgggaattgtggtgatattgattggtttttttagaaatgtgatgtttaatgggagtgagaaatggggttgtgttatgagtatttaggatgaaggatttgatatgggttgggagagaaagagaaattttggggagatggggaatttttaatattgagttttttaattttagatattgttttggggtttgagtttttgagagttatttttggggttttgggattttgtttttttttttttttttttttttttgtgtagggtgtgttttaatgtttttttgagtttttgtttgggggttgagaaattagggagaaatttttggtatggatttagtttatttttttttattatttattttgaaattttagttttttgattgaattttttgttttttattttatatttggattttttggatttttttggaagaaaatttattttaaggagtttggtgttagataatgaatttgttttgagaatgaaggtttagagatagttttttttttttttttttttttttttttttttttttttttttttttttttttttttttttttttttttttttttttttttttttttttttttttttttttttttttttttttttttttttttttttttttttttttttttttttttttttttttttttttttttttttttttttttttttttttgtttttttttgttttttttttttttttttttggaaaagttgtatttgagtatatgaaataggatagagattagtttttttttttttttttttttttttattagttgtag

SEQ ID NO: 212 - DNA, 14147 bp, Artificial Sequence
  chemically treated genomic DNA (Homo sapiens)
gggggtattgagtaatatatttagattaataatattttataagtgtgagtattattgatttaaatttttttgttggttgtgttttgtgtttatgtttgttttatatttattttttttagagttgttttttttagagttttagtaatttttatttttttaaatttttttagttatgggaaggattagtaggtgttagtggatttaaaagaattttagatttgttgagatttttgatttttggtgtttagattaattagtaaatagtttaattaaatggtttgtttttatggttaatataattttgaattggtggttatttagattaagtttattttgtttttgagatggaattttgtttttgttgtttaggttggagtgtagtggtgtgattttggtttattgtaatttttgttttttgggtttaagggatttttttgttttagttttttaagtagttgggattataggtatttattattatttttgattaatttttgtatttttagtagagatagggttttgttatgttggttaggttggttttaaattttgattttagatgatttgtttattttagtttttttaagtgttgggattgtaggtgtgagttattgtgtttagttaaagtttagtttgtataagaaggttttttttgttatgttataggatttttgagtttattaaatagattttaatgttttgagattttatgtatttttttaaaatgaagtatttaaattgttagtgtttgtttttttgtttggtttttttgatgtattgatttggtttgttagtgtgatgaaaaatatggttgagttttattgttttattgtaattagtaggattgtttagaagtttaatttttttaagagatgaagatttgagtttatgtagttggttgttttttaaaaatatttggttatttgggatatattttgaattaattttttggttattttatgtgattaaaagtgttagttttttttgtttttagtatatttttttgtttgggaagtggaagggatgaaatttttatatttttttttgatgatatagaaaggagtatatatttatattttatgaatagatatgtaattatagaagaaatagtttaatggttgggtgtggtggtttatatttgtaattttagtattttgggaggttgaggtgggtggattatgaggttaggagtttaagattagtttgtttaagatagtgaaattttgtttttattaaaaatataaaaaattagttgggaatggtggtaggtgtttgtaattttagttatttaggaggttgaggtaggagaattgtttgaatttggagggtggaggttgtagtgagttgagattatgttattgtattttagtttgggtgatatagtgagattttattttaaaaaaaaaaaaaaaagtataattatatgattatttatattgttttatatattaaattagtagtaatttgttttttatatagtaaataaaaataaattagtagtaataaatatattttttttgtgttatagttagtatttggtgaattttgtattttttttttttttaaagtgttgaatttataggtttttataaggtaagtttatattattaattaattttgtttttttttttgatgttaaaattgttttttaggagttgattaggtttatttttttgttttttaagtattatttttagaatatttttgaaagtatttttgttttttggtaataatatttatattttatttattttttgtttttaaatatatatttagttaattttaggttttttttaatggagtagttatttatttatttaatatatgttgggtgttttttttgtgttatatattgttttggtttttggggatagagtaggaaataaaaaaaaataaaatttgtttttatatagttgatattttagttaggggagataaataataaataaatgaatgatgtagtatgttagatgttgatagtgttatggagaaagtatattatggagattagaagtattatttgtaatggaatagttatgattttaagaagaatggttgattggatgtgaagtgtgagagagaggagtttaggtttttggttgagtaattggagggatggagttgttattatttgagatggagaagttaggggaggagtagatttggaggggaaggttaggaatttagtttggaatttgttaagtatgaggtatttattaaatattgaagtggatttttagaagatgttattaaaattagttaagtttaggagagagttttgggttagaaataaaaatgtgggagatattggtatatatatgggtttatattatttttttttttaatttaatattttattttattgttttttgtttttttaatagtatttagttttatttattttttaaattgatttttatattgatagtataataaaatttatattttttattatattaagattttgtgtgatttaatttttttttattttttggattttgttttaggttattttttttttttatttaatttttaatattttgattttattgttttttaaatagttttttgttgttttttgttttttttgtggaaaaggtttttttattgtttaattattaggtattttttgatttttttttattttttatttttgagaaaggttttttttgattttttatattaattaggatttttttgggtgagatttgatttaaattggtttagagaaaaggagttaattgattggtttatgtaatttaattttttttttttgttgtaatttttttttggtttttattttatttaaggttaaagttagggtttttattatggttttgtaggttttatatagtttgttttttttattatttttttgattttattttttatattttttttttatttatttttttttagttagagtggtttttttgttgtattttaaatatgttaggtatatttttattttagtgtttttgtgtttgttgttttttgtgtgtggaatatattttttatatagttatattatttaaaatttattgtttttaagtttttatttaaatgtttttttgtgaagttatttttgagttttttttaaaattgtagttttttatttttgtattttttattgttttttatttttaatttttgttattgtagttagaattatttgatatatagtttttattttattggttttttgttatgtttttttttataagaatttgaagtttattaggttgggagttttgtttgttgtgtttgttgttattttttagtgtttaaaattgtttggtatatagtaggtatttaataatttttgaattagtgaaaattagatggtggtttggtatttttatataggaatgagttaggtggaaattatttaggatataagtagattttgaagtgataaggaagggttattataattatgtggggtttattttgtttttttttgttttttttttttaggtttagtaatagttttattaaggattttatgaatattaaagtttatatttatatgttgttagaggtgagagtagtttattttattattagattttgtgtttagggtggtgatttgaagaaggaagagagtgaaagaagggaaggattatttttttttttaaattggagttaagggagggaggttagagtaagtttgggggtgtaatttagatttagtttttgtttaattttttttgtttttttttttaggggtttagagaattataaggtttgtagaattttttagagaagttttattattgattttttttttttatttttagatattaaagagtttgaatgtttttgagttatatggtttttttttttttttataaattttgttagttgttatgggggtttgtttttagggtataaagttattgagagatttagagatttagtttttttgtggaatttttaaaatgttttagtagttttgtttttagtttgttgtttggtagtatttgttagttgattttatgtattgtttttttttttgttattttggtaatttgggttttttattttatttttttttttatttttttttttagatgttattttttgaattgttatagagaatgggttaatttatggtggaggtttgtttatttttataataattaaagggttttaaggtttatgtttttatatatttaattattttttaggtattttaaattatatttaaattttaatttagttttattttgttttagtttttgtttgtaagtgttttagtttttaatgggtatagatttggattttgttttttttagttgggtttttattttaggttgagtttagttattgttaattaatgtagagttaggttttttttttttttaattttggttgtagtttaattttgttttttgaaagtattttgtttttgttatttaatgtttttttgtgtgtttgatagttattttgtttttttatttttgttgtgttttaaatttgtttttatttagttttatggttttgtttaattgtagagttgttttgtttgtttatgtggagtttagtttgatttatttttgttggttgttatgtttatttttatataagttttgtttttgttgagtagtatggtgtgtgatattgtttttttggtgttttggtaggggtttagaagttttttgtttgttaattagagaaaaatagggttatttatttttgtttttgggggttgttttttattaattttatgtaagttaattagtgtgaggtagatttttgtttttttgatataggttttgagtttttttagttgtttatagtttgttagtttttgagttaattggtgtggagtattgtgaaggttgaatgtgtttttttgggattttaggggttgtgagtgttttattatttttttttatgttaattatggtatagttttgtagggaagggtttgttttttaattttttgaggttttgtggttgattaatagtgttttggttaattagtgagtggtgggatattgggttttttttttttgggtttatgtgagttgtagggaaatgtaggggtggtttttaggtgttgttgttgttattgttattattatttttattgttgttttggaatttaggtttggggggtggtggggttgtgtatggagtttttgttttttggagttgttaatattgttaatgttattgttatgttatatataggtgagttttgggtttggagggtggagggtttagtttgtgattttatgtattttttttgtttttgtgtagaggatgtggtttggttggtggtttgttggtgtttgattttttgttgttattattatggttggtggatttgtgtgtggtattgtttaagttttttgttttttatagtggatttgattgtggtttaattttttttttttgttgtataatggattggtttgtgtgtttatgtttttttttatgttaatttagggtggatttgtttataggttttttttttatttttatttttatttgttttttatttatttttatttatagggagttagtttgtgatagtgtttagtttttttaatagtaggtgtatttgagtgtttggattttttttagttttaatttttaggagatttgtttgtggttttatttattttattttttttgtatattgtagtgaattaatttgtggtgttgtatttttttgtatttttttttaatagtgagtttatttgagtttgtatttttgttttttttagttttttaatgtattagtttatggttttttttaaaattattttttttttttattattattattattattttatagtggattagtttttatgtttggatttatgtttttttagttattagtttattgttttgtttttttttttttgtagattgttgttttagtgtttggggtttttttttttttaatagtgggttagtttagtgttttatatttttttatttttagtagtttagtttatagttttttttttttttgttttgaattagtttgtgtgatggtttttttttttttttattgtggtgtaggagtttgtaaggttttttgttttttttttttttagatgatgagttttattatttttttttttgtagtggatttgtttattggttttttttttttatatttttgtatgtttgtatagttttttgtatatttttttgtgagtttagtgttttgtaattgggggaagattggttgtgtatttttaatttttttttttttttttttttttttttagaagagaatgtgttgatttttttttttttgtgatggagtattgtatggttttttttgttttttattttttaatagtgggttagtttggttatatttgtaattataaagatgttttgttttattataataagtgaatatattagtgttagtgatgatagtaatgttaataggagttagtgtttattgagtatttgttgtatattaggtagagtgttttatatgaatgagtttttttaatttttattataattttatgagataggtagtgagggaattgggttatagggaggttaaattttttatttaaaggtggtttaggaagtatttaggatataggataatttttgaggttttttttttagattttattttattttatgtgaggttttagtttttaaaaattaaattagtttttatttttaagtttttgtttttgttgttttttttgtttgtagagtagtttttattttttatttttttttagtatttatttattttttaattttagtagttgtgtgattttagatgagtgatttaattattttttttttgtgtttttttttttatttgtgaaatgggggattagaattagaattttttttagtgtaaataaatattaattgtgaattaatggtaaaataagtaatttttttagtattattgtttatatttttttatttttttattgtgttttaattatattggttttattatatagttttttaaatatagtaggtatgggttagttttagggtttttgtattggttgttttttgtgttttgaatattatttttagatttttgtatggttttttttagtattttgtttaaatattaatttttaaaggatgtttattatattgtggtgtgtggaatgtagtataaaaagatatatgtatgaaagatgtttttaagaatgttagtttatatatgagtaagggttttttttttttttaaaaggatgtgtttataagattgaggtatgtaatatgttttgtaaaggtataggtataaaagttgtttttaagagtgttagttgtatatgtgaataaggattgtgttgttgtattgaaagaatgtgtttataaaattgtggtgtgtagttgggtataggggtgtgtatttatagttttagttatttgggaggttgaggtgggaggatagtttgagtttaggagttttaggttagtttgggtaatatagtgagatttttttttttgaaaaaaaaaaatttaaaaaataattattgtggtgtgtgtaatatatttttttaaaggtataggtgtaaaagatgtttttaagagtgatttgattttgttgtatttgggtagtgttattttattaaaggttgattgttatattatggtatttagaatatattatataaaggtatatgtataaaaaagaagtttttaataatgttatttgtaaaaataaaaaaagttaatttttttttgattatttgaagttgtatatttagtagggtttaagttaggtttttgatttgttttgttgttttttattattgtttgatatattgtgtgggttatttgtttgttgtttgtttttttttattagaatgtgagttttatgaggatttagtttttgtttgtttatttattgttatgtttttagtaattgaaaatgtattaggtaaatagtagatgtttaataagaatttattttatgaataaatgggaaaaagataatttgagatattagtgtaggggttatatgaggaagaagaagggatatgagagttaattagttgggattgtttttgtaattaatttttattgagttttttgtgagtattaggtatttttttaggtgttggaatatggtaaggaatgaaatagggtgaaatatttgtgtttgtggagttgatatttattaaaagttggggaggttgggtatggtggttaatattagtaattttagtattttgggaggttgaggtgggtggattgtttgagtttaggagtttaagattagtttgggtattatggtgaaattttatttttattaaaatataaaaaaattagttgggtgtggtggtgtgtgtttgtaattttagttatttgggaggttgaggtaggagaattgtttgaatttaggaggtggaggttgtagtgagttaagattgtattatgtattttagtatgggtgatagagtgagattttgttttaaaaaaaaaaaaaaaaaaatttaagttggggagatagattatgtgaataaaataaataagtaaaattagtataatagataaatgttgagaagaaataatgaaatagggtaggtaggaattgagtattgggggtggttgaaattttaggtatagggaaggtgatttttgaattagggttttatggtagagatggagagagttttaatgtttatgggaagagtatattaggtagaaggaagtgttagtttagaggttttgaggtgggatggtgtttgttatgtttaaggaatattaaggtggttagtgtggttggagtagagtgtggggaagggtagaaggtgaggttatataggtgatgggagttagatagtgtaggtgatatataggataggattgtaggggtagggggagaaggatgatatattagttaatagttaatatttgtggagtatttgttatatattagaggtatttttttgtttaaatattaatttttaaaggatgtttattatatggtggtgtttggaatgtattataaaaagatatatgtgttaaagatatttttaagaatgttagtttatatatgaataaggattttttttttttttaaaaggatatgtttataaaattgaggtatgtaatatgttttatggaggtataggtataaaagttgtttttaagagtgttagttgtatatgtgaataaggattgtgttgttgtattgaaagaatgtgtttataaaattgtggtgtatagttgggtatagaggttgaggtgggaggattatttgagtttaggagttttaggttagtttgtgtaatatagtgagatttttgtttttgaaaaaaaatttaaaaaataattattgtggtgtgtataatatatttttttaaaggtataggtataaaagatgtttttaagagtgatttgattttttggtatttgggtagtgttattttagtaaatatttattgttaaatattatggtgtttggaatatattatataaaggtatatgtataaaaaagaagtttttaataatgttatttgtaaaaataaaaaaaaaagttaattttttaagttttttatagaagtattttatagaattgatatagttaatttttatagaagttttggagggtaggtgtatttttgagaatatttgattttgagagtaaaatatttttattttatagatgaggaaataagtaaagagaggttgagtaatttgtttagggtaattttgagttagaatagttagaataggggtagaggaatataaggttgaagatttagaaagaagaatagatttgtaagggtaggtaggttatttggtatttttgattatgtagaggaagaatgaattttttttggaatgtgatgattgtgtaattgagtttatgaagtgagggaagagttttttttgtggggagagtagtttgtgtttatttttagaggttggaattgttttgggaatggtagatagtttagggtggttgttttagagtttttgtatatgttgtttgttttgtttgaaggtttttttttatagagggtagtttggtttgttatttttttttttttaggttaggtgttatttttttggggaagaattttttgtatattttgtgtaaaaatagtatttttgttattttttaggattttatttttttttgtttttttttatggagaattggtggtgtaaggtgattgtttattagagttaaattatttaggttttgaattttggttttgttaatttttagttgtgtgatttggggtaggttatttttttgtatttttattgttttatgtggaaaatgggggaaatgataatttttattttttaatggtggtttgaggatttaatgagttaaatgatttaaagagtgtgtagtttatggtaaggattgtatgtttggtttgtatttttaaattattaaaatgtatttatagtatatttgtagatgtttgataggtttttgaaattgattatttttaaaattggtgtgattttttttaaaatttatttttttgtaaggtttttattttagttgattataatgttgtttttgtgggtgattaggttataaatttagatttattttggattttttttttattttttttgggtatgttatttgttagtaagttttattttgtgtttaggttttttttagattttagttattttttgttagttttattgttattattattatttattgtagtggtttttttagttttaatagtttgttttttttataattgttagggggattttgttgaaattttagttatagtttgttatttttttgtttataatttttttgtggtttttgttttatttaatattttgatagtatttgaaaaagtttggtttagtttggtttttgttattttgttttttttttttgttgtttttttttttttttttgaatttatgttagttttttttttttatgttatttgttaggtattttttagttttgggttttttatattggttgttgtttttatttggtttgttgtttttagatatttatgagtttagtttttttatttttttttggtttttgtttagttgttttttttttggtgattatttttttttgattttttatgtaaaagtaatagtttttttttgtttgattttttttttataatttttattattatttgatgtatttttgtatatgtttgtttttttttttatttgttttttttgttaagatgtgagtttttttggagtagggattgttgtttgttgtgtttttgattgtatttgtagtatttggtttatagtatgtatttattaaatgtttgttaagtgaaggagatggaaagaagtaaatatatttaagtaaggtagattattagaatttttatgaggggttaagtgggagaaataataaaatataaagttttgtgtgttgttgaagttggaagtttattgttattttttatttagttgataggttttgttgtagttgaaagaagaattggtaaaattgtttgtttttgttattaggagttattttgaattttttggatttttgaaataagtttgtttgtaaaataaatttagtgaggtttttggtgataggattttttaattggatattttatggttttgtgatttgtataattgaataggaagtttatgtttatttttagtttgtttttaggaaagaaagtagtaatggggtgatagggaggattttgttttttgaaggatatgttgagagggaatagttggtgtgaggggttgtttagtttaatggtgaaatgtttagttaattggaatttgattgtttggttttaaatgttggttttgttatatgtggtttgtggaaggtatgtagatatttgtgtttttgttgttttatttataagttaatgataggaagattatttattttttagaggtatgattagggataaataagttaatgtttattaaaaaaaaaaataatagtataggtgtatatgtttttatttaaaatttttggggttagatgtgttttagaatttttatttttttatattttagaaaggtaatatgatgtatatatgatgttatataatattttttagtaagttttgtaattggttgtgtttatatttttgtagtaaaatgtatgaatatttgtaataagtgagatttaataaagattagaaagggttttgttttattttaaattaggttttgttattaaaagagttaaaagaagttttttgtttttagagtattttggatgttggaatggtagataagggattatgaataaattagaaattaatatttagagtttattatatattttaggtatataatatttaatttgtataatatttttgtgaattaggtattgttatttttattttattaatgggtatattattatttttgttttatatatgagaaaattgaggtataaagaggttaaagaatattagttaagtgtggtgttttatgtttgtaattttagtattttaggaggttagggagagaggattgtttgagtttaggagtttaagaatagtttgggtaatatagtgagattttattttttaaaaaaagaaaaagaatatgtttagggttatatagttaataagtggtagaattaggatttaaatattggtaatttggttttagtgtttgggtagttgtttagtaggttatattgtttttttgtttagaagagtgtttgatgtgtattaagtttttaatagatgttaattattgttgttattaagaaagagaatatttagggttgagtatggtattttatatttgtaattttagtattttgggaagttaaggtgggaggtgggtggattatttgaggttaggagtttaagattagtttggttaatatggtgaaattatgtttttattaaaaatataaaaattagttgggtgtggttgtgggtatttgtaattttagttatgtgggaggttgaggtatgagaattgtttgaatttgggaggtagaggttgtagtgagttaagattgtgttattatattgtgttttagtttgggtaatagagagagattttattttaaaaaaaaagaaaaaaaaaaaaagaatgagaatatttagggatagtaataggatagagagattaggtatttatttagttttaggatggttttataaaggaaaggatttttgggttgggatttgaaagataagaaagattgttaggtgaaagaaggaagttttatgtggagtgagtagtttttgtaagggtttggtaaaaaaaaaattttttgaaaaatttgatattgatatggtagaagatatagataatatttaaatgaggaggatggaattagttttttatttttgttgtaataaataattataaatttagttgtttaaaataatatatttgttattttatagttttgtaggttagaagttttatattggttttagttgaaattaaggtattggtagggttgtgttttttttggaggttttaggggaaaatttattttttgtttatttaagttgttggtagaatttaattttttgagattgtaggattgaagtttttgtttttttattgtttgttagttgatagttatttttagttttaagaggttgtttatagtttttgattttgagttttttttttttatttttaaagttaataatggtaggttgagttttttttatattttgaattttttttgttttttttgttattatatttttgagttatttttttttttttattatttgttttttagagtttatatgattagattgaattttattaaataatttagaaataatttttttgttttagggtttgtaattttaattttatttgtaaagtttttttttgttatgtagtgtaaataatatataggttttgaggattaggatgtggagtagggttggtattatttggtttattatagtttgttttttgatttttatagatttatatttgttttatatttaaaatatatttatattattttaagatatttatgagttgtattttattatagggagtattttaagtaagattggggagttagaagttagtttgggaaggtttagggaatgatggtagggtttgaagatagagatggagaaaagatgataaaaaaaggaattttttttttgttgatttttgttttttttatgtttatagttttttaatttagttgtttgttttttagg

SEQ ID NO: 213 - DNA, 14147 bp, Artificial Sequence
  chemically treated genomic DNA (Homo sapiens)
tttggagagtaaatagttgagttgagaggttgtggatataggaggggtagaggttagtgggaggaggatttttttttttgttattttttttttatttttgtttttaaattttattattattttttaaatttttttagattaatttttagttttttagttttgtttgggatgttttttgtgatgggatataatttatgggtattttaggatggtgtgaatgtattttgaatgtgaaataaatgtgaatttgtgggggttagagggtagattgtggtaggttaaatgatgttaattttgttttgtattttaatttttggaatttgtatgttatttatattatatagtagaaaggaattttgtagatgaaattaaggttataaattttaagatagggagattatttttggattatttgatgaaatttaatttaattatatgagttttgaaaagtagatgatggagaaagaaaggtagtttagagatgtgatgatagaagaggtaggggagatttaaaatgtgagagggatttaatttgttattgttggttttgaagatggaggaaggaggtttagaattaaggattgtgggtagttttttaaagttgggaatggttgttagttgatagatagtaaggaaatagggattttagttttataattttaaggaattggattttgttaataatttgaatgagtaggaaatggatttttttttagagtttttagaaggaatgtaattttgttaatattttgattttagttgagattagtgtgggatttttgatttatagaattgtaagataataaatgtgttgttttaagtagttaaatttgtgattatttgttatagtaagaatagaaaattagttttattttttttatttgaatattatttgtattttttattatattaatgttaagttttttaggaggttttttttttgttagatttttgtaaaggttgtttattttatgtggggttttttttttttgtttagtagttttttttattttttaagttttagtttaaaggtttttttttttatgaagttgttttaaaattgaatgaatgtttgatttttttgttttgttattgtttttgaatgtttttgttttttttttttttttttttttttttgagatggagtttttttttgttgtttaggttggagtgtagtatagtggtataattttgatttattgtaatttttgttttttaggtttaagtgatttttatgttttagttttttgtatagttgggattataggtatttatgattatgtttggttaatttttgtatttttagtagagatatggttttattatgttggttagattggttttgaatttttgattttaagtgatttatttattttttattttggttttttaaagtgttaggattataggtgtgagatattgtgtttggttttgaatatttttttttttgatgatagtaataattaatatttattgagagtttaatatatattaggtatttttttaagtagagaggtaatatggtttgttggataattgtttaggtattagggttagattgttagtgtttgaattttggttttgttatttattagttgtgtgattttgggtatattttttttttttttttaagaaatggggttttattatgttgtttaggttgtttttgaatttttgggtttaagtaattttttttttttggttttttaaagtgttaggattataggtatgaggtattatgtttggttgatattttttaatttttttgtattttaatttttttatgtgtaaaatagggataatgatatgtttattagtaaaatggggataataatatttagtttatagagatattgtatagattaaatattatatgtttgaggtgtatgataagttttaaatattagtttttgatttgtttatagttttttatttgttattttaatatttaaaatgttttaagggtagaaagttttttttaatttttttggtggtaaaatttgatttgaaatgaaataaggttttttttggtttttattgaattttatttattgtgagtgtttatatattttgttgtagaaatatgaatatagttgattatagagtttattaaggggtgttatgtaatattgtatatgtattatgttatttttttgaaatgtgaagaaatggaaattttgaaatatatttggttttaggggttttgggtaagggtatgtatatttgtattgttatttttttttttaatgggtattgatttatttatttttgattatgtttttgagaagtaggtagtttttttgttattaatttataaatgaggtagtggaggtataaatgtttatgtattttttataggttatatgtggtaaagttagtatttggagttaggtagttaggttttagttgattaagtattttattattaggttaaatggttttttatattgattatttttttttagtatgttttttaaagaataggattttttttgttattttattattgtttttttttttgagagtaaattggaaataaatatgagttttttgtttaattatataagttataaagttatgaagtgtttgattagagagttttgttattagagattttattgaatttgttttgtaggtaggtttgttttagaagtttaaagagtttagagtgatttttggtggtaaagataggtaattttattagttttttttttagttgtaatagaatttattagttgagtgaaaggtgatggtgggtttttagttttaatagtatatagggttttgtattttgttattttttttatttgattttttataagagttttagtaatttgttttgtttagatatgtttatttttttttattttttttatttagtaagtatttggtgagtgtatattgtgggttaggtgttgtggatatagttgagaatgtaatagataataatttttgttttagaggagtttatattttagtaggaaaggtagatgagaaaaaaggtaaatatgtataagagtgtgttagatggtggtaagggttatgggaaaaaaattaagtaggggagagttgttatttttatatggagagttaggggagagtagttgttaaggaggggataattgggtagagattaaaaggaggtgaaggaattgagtttgtgagtatttgagagtagtaagttaggtggaagtggtagttggtgtgaagggtttaaggttggagagtgtttggtaggtgatatggggagaggaggttgatatgggtttgggggagaggagggaggtagtgggagaggagaatagagtgatgggggttagattgagttaggtttttttgggtgttgttaggatgttgagtgagataggagttataagagggttgtgaatagagggatgataggttgtgattgagattttaataggatttttttggtggttgtgagaagaatagattgttggggttgaagaagttattgtggtagatgatggtggtagtagtggggttggtgagaagtagttggggtttggagaaagtttgaatatagaataggatttgttgatagatagtatgtttgggggaggtgagagaagggtttagggtgagtttaggtttgtggtttaattatttataaagatagtattgtggttagttgaggtgggagttttgtaggagagtaagttttgaggggggttatattagttttggagatggttagttttagaggtttgttagatatttatgggtatgttatgaatatattttaataatttaaaaatgtaagttaggtatatgatttttattgtgggttgtatattttttgaattatttaatttattgaatttttaaattattgttaaagggtggggattattattttttttattttttatatgaggtaatggaggtatagagaagtaatttgttttaagttatatagttggaagttggtagagttggaatttaaaatttaagtggtttggttttagtgagtaattgttttatattattagttttttatgaagagaaatagagaagggtaagattttagagagtgataggaatgttgtttttatatagggtgtataaggagtttttttttaaggaagtgatatttggtttgaaggaggggaggtagtaagttaggttgttttttgtgggggagggtttttaggtggagtgaatggtgtgtataaaggttttgaggtagttattttgaattatttattgtttttgagatagttttaatttttgagggtaagtatgggttgttttttttgtagggagagttttttttttattttatggatttaattatataattattgtattttaggaagaatttattttttttttgtgtgattaaaggtgttaaataatttgtttgtttttgtaaatttgtttttttttttgagtttttagttttatgtttttttgtttttgttttggttattttggtttaaggttattttgagtaagttatttagtttttttttgtttgtttttttatttgtaaaatggggatattttatttttaaagttaaatatttttaaaagtatatttattttttaaggtttttgtgaggattaattgtgttaattttgtaaaatatttttgtaaaagatttgaggggttgatttttttttttgtttttataagtagtattgttaggaattttttttttatatatgtgtttttgtatagtatattttaagtattatagtgtttaataatgaatatttattgaaataatattatttaggtgttagaaaattaaattatttttagaaatattttttatgtttgtgtttttaggagagtgtattatgtatattatagtggttattttttgggtttttttttggagatggggattttattatgttgtataggttggtttggaatttttgggtttaagtgatttttttattttagtttttgtgtttagttatatattatagttttgtgaatatatttttttaatgtaataatatagtttttatttatatatataattagtatttttagaaatagtttttatatttgtgtttttatagagtatattatatattttagttttgtgaatatatttttttgaaaaggaggaaaatttttatttatatataaattggtatttttagaaatatttttgatatatgtatttttttgtagtgtattttaggtattattgtgtggtaaatattttttgggggttggtatttgaatagaaaagtgtttttgatgtgtggtagatattttatagatattagttattagttagtgtgttatttttttttttttgtttttgtaattttattttatgtattatttgtattatttggtttttattatttgtgtgattttattttttatttttttttgtattttgttttagttatattggttgttttgatgttttttgaatatggtaggtattattttattttagggtttttgaattggtatttttttttgtttggtatgttttttttgtagatattaaggttttttttgtttttattgtgaggttttaatttaagagttattttttttatgtttaagattttaattatttttaatatttgatttttatttgttttattttattatttttttttagtatttgtttattatgttaattttatttatttattttgtttatatagtttgtttttttagtttgggtttttttttttttttttttgagatagagttttgttttgttatttatgttggagtgtatggtgtaattttggtttattgtaatttttgttttttgggtttaagtaatttttttgttttagttttttaagtaattgggattataggtgtatgttgttatatttagttaatttttttgtattttagtagagatggggttttattgtgatgtttaggttggttttgaatttttgagtttaggtaatttatttattttagttttttaaagtgttaggattattggtgttagttattgtgtttagtttttttaatttttaataaatgttagttttataagtataaatattttgttttgttttgttttttgttatattttagtatttagaagagtgtttggtatttataaggggtttagtaaaggttggttgtaggaatagttttaattaattagtttttatattttttttttttttttatgtgatttttatattggtgttttaaattattttttttttatttatttatgggataaatttttattgagtatttgttgtttatttggtatatttttagttgttggagatatagtggtgaatgagtagataaaaattgagtttttatgggatttatattttaatgaggagagatagataataaataagtaatttatatagtgtgttagatagtgataaagggtaatgggataaattagggatttggtttgagttttgttgggtgtgtagttttagatggttagggaggggttgattttttttgtttttataagtagtattgttaggaattttttttttatatatgtgtttttgtatagtatattttaagtattatggtgtgataattaatttttaatgaaataatattatttaggtataataaaattaaattatttttagaaatattttttatgtttgtgtttttaagagagtgtattatatatattatagtggttgttttttgggttttttttttttagaaaaagggattttgttatattgtttaggttggtttggaatttttgggtttaagttatttttttattttagttttttgagtagttgggattataagtgtatatttttgtgtttagttatatattatagttttgtgaatatatttttttaatgtaataatatagtttttatttatatatataattagtatttttagaaatagtttttatatttatgtttttatagagtatattatgtattttagttttgtgaatatatttttttgaaaaggaggaaaatttttatttatatataaattggtatttttagaaatattttttatatatgtatttttttatattgtattttatatattatagtgtggtaaatattttttgggggttggtatttgaatagagtgttgaaaggaattatgtagagatttgggggtggtgtttaaggtataaagaatagttaatgtaaaggttttgaggttggtttatgtttgttatgtttgaggagttgtgtggtggaattagtgtggttggagtatagtaagggggtgggaaggtataggtggtaatgttagaaaggttatttgttttattattaatttatagttaatatttatttatattggaagggattttagttttgattttttattttataaatgaagaaaaaggtatagagaggaagtggttaaattatttatttaaggttatatagttgttgggattggggggtgggtgggtgttgagagaaggtgaggaatgaagattgttttgtaggtagagggaatagtaagaataaaagtttggaggtgagaattaatttggtttttaaggattgaggttttatgtggggtgggatgagatttaagaggggagttttaaaaattattttgtgttttgagtattttttgggttatttttgagtaaggaatttaatttttttatggtttaatttttttattatttattttatggggttgtggtgaggattaaaggaatttatttatatgaaatattttgtttgatatatggtaggtgtttaataaatgttagtttttattggtattattattattattggtgttaatgtatttatttattgtagtgaggtagaatgtttttgtggttatgagtgtgattaggttgatttattattaagaggtggaggatagggaaggttgtatagtgttttattataaggaaaagaggattagtatgtttttttttgggaagggaaaaaaaaagagaaggaaattgaaagtatatggttgatttttttttaattataaagtattggatttatgggagggtatgtgggggattgtgtaagtatataggggtgtgggggaggaaggttaatgaatagatttattgtaaagggaggggtgatgaggtttattgtttgaggggaaggggagtagaaaattttatagatttttgtattatagtgagaggagagaaaagttattatatagattgatttaaagtagagagggaaaaggttatggattgagttattgaaaatagggagatgtaaagtattaaattaatttattattaaaaaggagagaattttaagtgttagagtgatagtttatgaaaaagaggagatagggtaatggattgatagttaaagggatgtgaatttaaatatgaagattgatttattataaaatggtggtggtggtggtggggggggggggtggttttgaaaaaagttatggattgatgtattgggggattggaggaggtaggaatataaatttaggtagatttattgttaaagagggatgtggaggagtgtggtgttatggattgatttgttatgatgtataggaagggtggaataaataaggttatggatgggttttttgaaagttgaggttaggagaaatttaaatatttagatatatttattattaagggggttgaatattgttataggttagttttttataagtgggggtgggtggggggtgggtgggggtaggggtagggggaaagtttatggatgagtttattttaagttggtgtggggaaaaatataagtatgtagattgatttattatataatgggagggggaggttaggttatggttagatttattataagggatgaagggtttgagtaatgttatatgtaggtttattagttgtggtggtggtggtggggagttgaatattagtaggttattggttaagttatattttttgtgtgggggtgggaaggatatgtggggttatggattgggttttttattttttaggtttagagtttatttgtgtgtagtgtggtggtggtgttggtaatgttggtagttttggggggtgggggttttatatgtggttttattgttttttaggtttgggttttgaggtggtggtggaggtggtggtggtggtggtggtggtagtatttagaagttgtttttgtgtttttttatagtttatgtgggtttgaggaggaggagtttaatgttttgttgtttgttgattggttaaagtgttattaattggttgtaaggttttgaggggttgggggatgggtttttttttatagagttgtgttgtgattggtgtaaggggaaatgatggaatgtttatggtttttggagttttgaggaggtgtgtttggtttttatggtgttttatgttgattggtttaaggattgatggattgtgagtaattgaaaaggtttggggtttgtgttgggggggtgggggtttgttttatattgattggtttatatgggattgatggaagatagtttttaaggatgggggtgggtggttttgtttttttttgattggtggatgagggatttttagatttttgttaaaatattaagggggtggtgttgtatgttatgttgtttagtggaagtagggtttgtatagaaatgggtgtagtagttggtgggagtgggttggattgggttttgtgtaggtgggtagggtagttttatggttagataagattatagagttgggtaaagatgaatttagaatatagtggaggtaggagggtaggatggttgttaggtatatgaaagagtattgagtggtagaaatgaaatgtttttagagggtagggttgaattgtggttagagttaaaaaggggaggaatttggttttgtattgattggtggtggttggatttaatttagaataggggtttgattagggagagtgggatttaggtttgtgtttattggaagttggaatatttataagtaggggttaagataaggtagggttgagttagggtttgggtgtaatttggggtatttggggaatgattgggtgtgtgaaagtgtaaattttagggttttttgattgttgtgggaatgaataaatttttattatgaattggtttattttttatggtaatttaaagggtggtgtttaggaaaaggaatggaagaaagggtgaggtggggggtttaggttgttaagatgatagaagagagggtagtgtataaggttaattggtaaatattgttaggtaataggttggaggtaggattgttggggtattttggaggttttatagagagattggatttttgggttttttagtaattttgtgttttaggaataggtttttgtggtaattagtagggtttatggggaaaaagaagggttatgtgatttaaaggtatttaggttttttaatgtttgaggatggggggaagaagttaatggtgaggtttttttgggaaattttgtaggttttgtagttttttaagtttttgaaaaagaggatagaagagattgaataaagattgggtttgggttatgtttttaggtttgttttgattttttttttttgattttagtttagagggaaagatggtttttttttttttttgtttttttttttttttaggttattattttaaatatagagtttggtagtggggtgagttgtttttatttttagtaatatgtggatatgggttttgatatttatggagtttttggtgaggttgttgttgagtttagagaaaagaaataagaaagggtaaaatgggttttatatgattatgatgatttttttttattattttaagatttatttatattttggatgatttttatttggtttatttttatgtggaaatgttaagttattatttggtttttattgatttaaagattattaaatgtttattgtatgttaggtaattttaggtattgggagatagtagtaaatataataaataaaatttttggtttgatggattttaaatttttgtaaagaaagatataataaaaaattaatggaataaaagttatgtgttagatggttttaattataataataaaaattaaaaatgagagataataaggagtataggagtggggggttgtaattttaaagagggtttagggatggttttatggagaagtatttgagtaaagatttaaagatagtgaattttgagtagtgtggttatatggaggatgtgttttatatataaggggtagtaaatataaaggtattgaggtgggagtgtgtttggtatgtttgaggtgtagtaaagaggttattttggttggagaagaataagtgaagggggaatgtaagaggtgaggttagagaggtaatgagggagataaattgtgtgaagtttataaggttatggtaaggattttggttttgattttaagtgagatgggagttaagggaaggttgtagtagaggaaggaggttgaattatatgaattagttagttgattttttttttttaagttagtttggattagattttgtttaaaagaattttaattgatataaagggttaaggaaggttttttttaagaatgaagaatgagaaggaattgaagaatgtttaatggttaagtagtaggaaggttttttttataaaaaggataagaggtaataaagagttgtttgagaagtagtgaggttagagtgttagaaattgagtggggagggaaagtggtttaagataaggtttaagagataggaagaggttagattatatagggttttaatataataaggaatgtggattttattgtgttgttaatgtaggagttagtttgaggggtaaatgaaattaaatattgttggaaaagtagagagtaataagataggatgttaaattggaaaaaaaagtagtatgaatttatgtatatattaatattttttatatttttatttttagtttagaatttttttttgaatttgattagttttaatgatattttttaaaaatttattttagtgtttaataagtgttttatatttaataggttttagattaaatttttgatttttttttttaaatttattttttttttaatttttttattttagataatggtaattttatttttttagttgtttagttaaaaatttgggttttttttttttatattttatatttagttagttattttttttaaaattatgattgttttattgtaggtaatgtttttgatttttatgatatgttttttttatagtattgttaatatttgatatattatattatttatttgtttattgtttgttttttttgattagaatgttagttgtatgagggtagattttgtttttttttgttttttgttttatttttagggattagaatagtgtgtggtatagaggaggtatttaatgtatgttgaatgaataagtgattattttattaaaaggaatttgaggttggttgagtgtatgtttagggataggaaataaatgaagtatgggtgttgttgttagagagtaagaatatttttaagaatattttgggggtaatgtttaaagaatagaagaatgaatttgattagtttttaagggataattttaatattaaaaaagagaataaaattagttaatggtgtaagtttattttatgaaaatttatgagtttaatattttaaaagggagaaaaatatagagtttattaaatgttagttgtaatataaaagggatatgtttattattgttgatttatttttatttgttatgtgagaagtaaattattattgatttagtatgtaaggtagtgtgaatagttatatggttatgtttttttttttttttttgagatggagttttattgtgttgtttaggttggagtgtagtggtgtgattttggtttattgtaatttttattttttgagtttaagtgatttttttgttttagttttttaagtagttgggattataggtgtttgttattgtttttggttaattttttgtatttttagtagagatggggttttattattttggataggttggttttgaatttttgattttgtgatttatttattttggttttttaaagtgttgggattataggtgtgagttattgtgtttggttgttaggttgttttttttataattatatgtttatttatgagatgtggatgtgtatttttttttgtgttattaggaaagaatatagagattttattttttttattttttaaataaagaaatatattaagaataggaagaattgatatttttgattatataaaatgattagaaagttagtttaaagtatattttaagtaattaaatatttttaaaggatagttagttatatagatttaaatttttattttttagaaaaattaaatttttagatagttttattaattataataaagtagtaagatttaattatattttttattatattaatagattaggttagtatattaaaaagattaggtaagggggtaggtattgataatttaaatattttattttggggaagtatgtggagttttaaaatattaaaatttatttgataggtttaggaattttgtgatataataaggaaagtttttttatataaattagattttagttgggtgtggtagtttatatttgtaattttagtatttagggaggttgaggtgggtagattatttgaggttggagtttgagattagtttggttaatatggtaaaattttgtttttattaaaaatataaaaattagttgggagtggtggtgggtgtttgtagttttagttatttgggaggttgaggtaggagaattttttaagtttaggaggtagaggttgtagtgagttaagattgtattattgtattttagtttgggtgataagagtaaaattttgttttaaaaataaagtggatttggtttaaatgattattagtttagaattgtgttgattatgaaagtaggttgtttaattaaattatttgttaattggtttgaatattaagaattagaaattttagtaggtttgaggtttttttgggtttattagtatttgttagttttttttatggttggaaaggtttgaaaagataaaaattattgaaattttaagggaggtaattttggaaaaaatgaatgtagaatagatataaatataaaatataattaataaagaagtttaaattaatggtatttatatttgtgagatgttgttaatttaagtgtattgtttagtgttttt

SEQ ID NO: 214 - DNA, 2240 bp, Artificial Sequence
  chemically treated genomic DNA (Homo sapiens)
attgaggatttggaaatgaggtttaagggtagttaaggatggttgtagttttatatgattagttgttaaagtaagttgaggtattgaagatggagaatttaaatttttgataagagttagaagataattttaattattttataaaattggaaattgaggtatttaatatgaaggaagtatttaaataattataaggaagtattgaagatgaagttatggttttttttggatagattgatttattagagtgttttaaagagtttaatttagatagtagtaatttttttggagtaaaattgtggttaaaaatgtttttttgtttttatggaagttgggaaggatttgtattaagttgttttggagagtgtagttttgtttttatgggtttatttttaagaagagggtttgtaaatggaagtagagaaagtattggatatttagaagaatttgagaaagagaggttattgttttttgttgattttgataaagaagaaaaggaaaaagattggtattatgtttaattttagaattttattaaaagaatagatagtttttttttaattgaaaatttttttttataaatagatatgattagaaggtaattggaatatgaagtaaggtaaattagagttgtgatggaagaataattaggtatttgttaggatatggaaaaatgagtatagtgaagaatagttagaatttagtaaattgaaaaggatatattttgtatatgatagtttttatagttttaagtaatagaagtagagaggttattttagaataagtatgaaattggtttatatgatgttgagtggtagaatgaaggttaaggagtgggagaaattaatatggtaatttttggtaatggttagggtttaattatatgaatggattatgaaatagttagtgttttgagttttagtagtatatattttgtattttgaaggttgataagttatttgggaattaaggtggaaatggtgtatttattgttgttaatgtttggtatttatgataaggatgatatgttgtgaattttgttagttatgtttagtttttaagatagttgtatatttatgtgatagtttggatgtttttttttttttatttagtttttatatggtaatgataaagattttgtattgttgggaaatttttggggtagtaaagaggtttgggttagggttagtgtagtattttataatattatttatttatagtttgatgataagagaggtaggtgtgaaatttgagttttttattttttggaatagatatgtgtttattgtgaaatttgttgggagtggtaggaagtttatgaattaggtatggattaggataaaaatttaatgttagtttttgttgaatattagatttgttttgttgtgtgtgttttaatgaaatttttatttgatgaagagtatagatatgtaatgaatgaattagggggattataggttattgtagaattattgtaagtggattgtgaaatgtatgggtttattaatgattattatagtattatattaagatgatatgttggaatggttttgataaatttgatttttggagatgtagttaataaggttatgttatgttttatgaaaggttgtatgagagtatttgtggtttaattaaaatttgaaagtgaagatttatagtaggttattgtaagtgttttgaggaatttgttttggtgagtagatgtaaatagtaaaaagatgttgtgagaagttggaagtgtgaaagtattgatggaatgtgttttagaagttaaaaaggaattaatttttaaaagtgtattgagtgttttatggaatttgttagtatattgtattgagaataaagttgatatatgtgttgtagatggtgtatttgtatttttggttggtatttttatttattggagttagataaatattttagttattattgaaagtggaggtgggatattatggaatgtgtttagtttgatagttataaatgaggattataggtaaattttaagagagaataattgtttataaattttattataatatttaaaattttatagtttgataatagttagtaatgtatgtggaattttgtggaattttttagtaagaaattttaaagattaggaagtattatgggatatgggggtagttagtatgtttaagaattttatttatttaaagtataaaatgattgttatgggaagtgttgtagttttaaggaattttatggtaaataggttt

SEQ ID NO: 215 - DNA, 2240 bp, Artificial Sequence
  chemically treated genomic DNA (Homo sapiens)
aggtttatttgttatgagattttttaaagttgtagtattttttatagtaattattttgtgttttgaatgaatgaggtttttgagtatgttaattgtttttatgttttataatgttttttggtttttaggattttttgttgagagattttataaagttttatatgtattattgattattgttaaattatgagattttaagtgttgtaataaagtttgtagatagttgtttttttttaggatttgtttgtggtttttatttgtagttattaagttggatatattttgtaatattttatttttatttttaataatggttaaagtgtttgtttggttttggtaagtaagagtgttaattaaaaatgtaagtgtattatttatagtatatatattagttttatttttagtgtaatgtgttgataaattttataaggtatttaatatgtttttgagggttgatttttttttaatttttaaagtatattttattaatgtttttatatttttaattttttgtaatgtttttttattatttatatttgtttgttaagataaattttttaaaatatttgtaataatttgttgtaagtttttatttttagattttagttgggttataagtgtttttatgtagttttttatagagtatagtgtagttttgttggttatatttttaaaagttaagtttgttaaagttattttagtatattgttttagtgtaatattgtagtggttattagtaagtttgtatattttatagtttatttgtaataattttgtaatggtttgtagtttttttagtttatttattgtatgtttatgttttttattaaatgaaagttttattagaatatatatagtaggatagatttgatgtttaataggagttggtattggatttttgttttggtttatgtttggtttatgagttttttgttatttttaataggttttatagtaagtgtgtatttgttttaaaagatgaaggatttggattttatgtttgttttttttgttattaggttgtgagtgaatgatgttgtggagtgttgtattggttttggtttgagtttttttattgttttgggaattttttaataatatagagtttttgttattgttatgtaaaagttggatgaggagaggaagatatttagattgttgtatggatatatagttgttttgggagttagatatagttagtaaagtttgtgatatattatttttattatgagtattaagtattgataataatgaatatattatttttattttggtttttagatgatttgttagtttttgaggtgtagagtgtgtgttattagaatttaaaatattggttgttttatggtttatttgtgtagttgaattttgattattattagaagttgttatgttgattttttttattttttgatttttattttgttgtttagtattatgtgagttggttttatgtttgttttgagatgatttttttgtttttgttgtttgggattgtaaaagttgttgtatatgaagtatgttttttttgatttgttgaattttggttattttttgttgtgtttgtttttttatattttggtaggtatttagttgtttttttattgtaattttgatttgttttgttttatattttaattgttttttggttatatttgtttgtaaggaaaaatttttagttaaaggaagattatttatttttttagtgagattttgaagttgagtgtaatattagttttttttttttttttttttgttaagattagtaagaagtaatgattttttttttttaagtttttttaaatatttagtattttttttgtttttatttataaattttttttttggaaatgaatttataggaataggattgtattttttagaatggtttgatatagattttttttggtttttataagaatggagggatatttttgattgtagttttattttagggaaattattgttatttaagttaagttttttaagatgttttaataaattaatttgtttagaagaagttatagttttatttttaatatttttttgtagttgtttaagtattttttttatattagatgttttagtttttagttttgtaagatgattggaattattttttagtttttgttgaagatttgagttttttatttttagtgttttaatttgttttaataattgattatatgaagttgtagttatttttggttatttttggattttatttttgagtttttaat

SEQ ID NO: 216 - DNA, 8169 bp, Artificial Sequence
  chemically treated genomic DNA (Homo sapiens)
  unsure (2047, 2136, 7481, 7492, 7502..7503, 7505, 7511): unknown base
ggaattatatggtttttagtaatagtatgttgttatttattatagtaattttttttggttatatggaaaaatttagatatattaagaaaagttaagagtataaaattaagttatattggagaaaaatgttgtttttttatgtttttaagataaatattttaatgttaggttaaaatagtaatgttagaattaaaaaaagttaaagaggagaataattattttaggttttttttaggggagaaaaaaatgaaggaaatgatatattgatttgtaaattatgtatagtaagaaattgtaaaagatgaatttttgtaatatgaatttgagaaataaaaaaaaaaaaaataattgtattttaaggaatgaaattattattttaaattaagaagataatatttttaatttaaaattaggaaaattaaatagatgttaaggagaagatatttgtttaaaaatagagtataaatttaaaaattaaaattttttaaaattttattaaaattagataatattttaagaaattttgttgttttaaatataaggaattagattttggttttgtattagtgtttgttttttggttttttatttgagaatgtttaatttttagaaaaatatataaataatttgtttttaattttagttaagttaataatatataaaattttttttattagtttattttttattagttttttttaattttagattttttatttttttaatttttattttttagttttataatttttttttttttaaaaatgtgggataattaattattttattttatttgattatgatatagatatttattttgtatatatgatttaatataaaattttaagattttaaattatatgagtttatttataaatatttattttatttatagttaatttattttttaataattatatttatattttttataaaaattgagatattagatggagttggttattattttaagtttttttaaattaaataattatatagtttgttaatatgaggtgtttatttatataagagttataaagttaaatatatgggtatttgtagataatttagaaaatataatttttgtttttttttttagaggtaaaggtttattttgttgtttaggttagagtgtagtggtgtgattatagtttattttagttttgaattttgggtttaagggattttttttttttagttttaagagtagttgggattataggtatatgtttggttaatttttaaatttttttatggagattgggttttgttatgttatttaggttgattttaaatttttgggtttaagtgatttttttattttggtttttttaagttttggtattgtaggtgggagttattatttagttatagttgtttttgttaaataatattaaattaattttatttattaaagaattgtataaatatatattattttgttttaggtttggtttatagttttatgattttaatagtataggtaaatataaaattgattagtgttggtgtttagaaattgatatgttaaaatatggtatttgatatgttaaattaaagaagttttaaggtttttttgattttttttttaattttattattttttttaaagaagttgaagtttttttatttgtttaataattagatttattaaggagagtaattgttggtttttttttttttgttattttatttgttaaagaaaagaagattaaaatgtaattatatttaagtagatttttatagaagtataatgattgtttttaaggattatttaaattttaaagaaaattatttataagttaatatttgttgtttaatttaattatttttttattaattatttattgttttttaataaattttttttttttttttataatttgttttattagaatttaagttttttattttttttgtaattttaagattagtgtataaatttttataatttattgagttaggatttttagtaattttggggggtgagagtatagttttaatatagtaatatagtaaaatatttatgatatgtagaagatgtttntatttattttattattaatataaatttattattttttaaagaattgagttatatgatttaaaaaaatagggttaattattatgttttgntgtggtgtttatttatttaaattaattagattaatattttttaagggattgtggtttattatattgaattttattatgtagatataatatataatataatatatgtatatatgtgtaaatatatttaaataaatatatatataaaggttttttagtttttattttagaattttagttgtgagatagtaaaatatataaatttgttggtttatagagaatagttggatttaaattatttttttggtaaaatgagataaaggttatgaattaaattttggtaaaatagtttgagttaattattagtgtagggattaaagggaaattttagtgaaggtttattgaaaaattaatttgtaaaaggtagattaattggagaaaaagtatataaatgtatttaatatgtatatatgggagtttgtagaatgatgatttaagtatatagaggaaattgtttatttttaatttaggattaataaaatatagatagttatgtagaaatatgattggatagaaagagtatgagttaatgttaataaaatgagtggggaaatttagtgaaaaaagttaaattttgtaaaatatttagaggtttattttgagttaaatatgagtgattatggtttgtgatatagtattaggaggttttgagaatatgtgtttaaggtgtttggattatagtttttttttatatattttaggaagatagaagatataggtaaaaatattagttaatatatgtaaggtatatattggtttgatttggaaagttggtatattttggaggaggaggggtttggttagtggtggtaggagggaggttgtggaagttagggtttttgttatatatgtgaagtttgtaatatgttttagaaagaatagatggtatatgtattttaaaaggtaaatgattttaaatggtgttagatttttagttaaattttttttggattagagaaagatttggaaagggaaggagattgtttatagaatataaattttttttgtaaaagatagttttgtataggattattttaaaatatgttagaaatatattttggggtaaaatattttgattgtttttagggttgttatttgttatgtgatgttatgattagaattaggttggaatttgttttgagataggtttttattttgttgtttagtttggagtatagtgtttttgattatggtttattgtagttttgattttttttgatgtgggaggtttaagtgatttttttatattagttttttaaatagttgggattataggtggttattattatattgggttaaatttttttaaagtagagataagttttttttatgttgtttaggttggtttttaatttttggttttaatttttttattttttaggattataggtgttaggttagattttataggtttttagatttttatgtattaggtatttggtagggggagggattatagtggtagaagagtagtattagtggtttatattatatattttggttttagttggttggggtatataaaattaggtgttattgttaatgattaggtttatagggtattgttgttaaaatttgttgttaataatttttatatattttttaaaatgtttggtaggtggtggtgtgtatttttaatgtatttgttgttagttttataggtaagggagaaagaagttagatggagtttggagatgtggagggtagatgtaggtgtatttggaaaagggattggtggtgggaggtgtagagggaaaaaggaatgatataattgggttttttagttgttggtgaagtttgatggggtgttttgtgagggtttggtgagggttttgttaggatagtagtagtgtgtttaaggagtgagaggtatttggggttattggagttagatttttaatttgttttagtgggaggtgaagaataatgaaagttttgtatttttatttttttaatggttaatgatattaaaggtttttatatggttatttgttatttgtatatttttagtgaaatgtttgtttatgttttttgattattttttaattggatttttaaaaataattgatttttgagttatttatatattttagatattggttgtatgttagatatatggtttgtaaatatttttttttaggtaaatttttttagtattgttatagggttttttataaagtaaaagttttaaatttatggagtttaatttattaatatttttttttattggttttgttattaatgttaatttaagaattttttgtttagttttagataatagtttgttgttttttaaaattgttttgtaattttatttgttatagttatatttagttatttaatttttatgtaagggttatttttggtgggggggaatttatagatgttttgtttttttagtattatttgtggaaaagattatttgttttgtattaaattgtttttggatttttgtttaaaattagttggattggtttttgttggtaaagttttgtttgaagtttattttaataggtgagaaaaagtttatagtttaatagtttttttttaatttgtaattttgttttgaatttttggattagttttttgattgttgtagatgttaagtggattttgtgttgttttgtgttgggttagttttttatggttggttttttattatgtattgtgtaagtggaatttatgtttgttatttatattttttgtgtttttgtattttgtttttgtgtgtaagttggaatataaaattgtggaggagtgagtttttggggtgtttagttggttgttgtggtagtttttttgagtagtgtatttgttttttaggttgtttggtttgtgtttttgagaaaggtaagttttttttttgtttttttaggggtatttgaaaataataagtgttagataaagtagtagatgttgttgtgtagtagaagtttatgggtgagttgtttttgaaattggaattaggttttttttggtgtgattatgtaagaattatttgtagttttgtgtttttggtaggttttgtaattgtattttggatagttttgttgggaagttagtattttttaatatagaagaatgaggtttgataagtgtgtgagtttaaaggttgatatagtgtttattattatagttgtgtaggtagttagtgtttaggaagtaatagtggagttatgtagtgtgaaagtaagattgaaatgggtgaggagggtagtagttgttatagttattagagagaaatttgattttgtaggtgtgtggtgatgtttatgagttaggttggtgttgtaatagtagtggtgggattttgagttttgtatggttgttgggtttggatgttttttggtttttggaaatttttattttttttttagtttgaggttaggtggtttgggaaggtggaaggagtgtggaggggagtggggggggggggggtttattgtttgagaatgagaattttttttatatttggaaattttagttattatgtgtgttttttattaatttttttttttttattttttttttgatagagatggtggtttttttatgttatttaggttagttttgaatttttgtgtttaagtgatttttttattttgattttttaaagtgttggaattataggtatgagttaatgtgtttggttgttttattaattttttatgaatgaatttgtatatatattttttagagtaggaagtaatgtaaaatagaataattagtaatgtatattttttaatgtgggatgttggtggttaagagatatttggtttttattggaatttttgatattaatatggagtttataatagttgtggagagtgtagataaggttaggatttttgtgattagagaatttttagtgtgtgaagatttaaggaaagttggattgttgatttttgttaataaataagatgtgaaagattgtattattgtagtagaaattttttagttttttaagttaaattttattaaaggttattattgttaaaggaattgtgtttaggatttggatagttgatgttattatttaatattagatgatattaattaattatattttatagattggaataaagtgttagattttatttgaaagttgtaaaaatgaatggtttagatatatgtatgtatttattttatattaatttttttatttattgtattaatttttttggttttttttaattaagaatataaaattatttatttaaattttgttatttaagtttagaatatttttagaattatattattttaaagaagttagattagaattagaagtaagttaagtttgaagatataataattagtaataatattttttttttttaaatgaaaattttaatatggggtgggtatgttgtgttatatttgtaattttaatattttgggaggttgatgtaggaggattatttgaatataggagtttaagattagtttggataatatagtaaaattttgtttttataaaaaataagaaaattagttgggtatggtgttatatgtttgtagttttagttatttgggaggttgaggtgagaggattgattgattttaggaggttgaggttgtagtgagttatgattgtatgattgtattttaatttgagggatagagtaagattttgatttaaaaaaaaaaaataaaaaaaaaaaaattattattaaaattttaatatggatatattatttttttatgggatttgtatattttaaaaagggtttttttttttagtattgggagagtatgtgtttaattatgtagttagtaagataggttagtttatatagggagtgtgttatttataaaaagttttttttttttttttggtattgtatatgatataattatagttgtatttgaagagaagtgtattttaaggattattattatttagaaatatgtataaatttttatatttagtgttataggaatgatattgttttgtattatttttatttttgtttagaggttagttatgtggtttgtttgtatggtgtttagaattttttttatttgatttaggatgtttttgaagtagtttttttgggtagttgtttggtatttaggatatatttgtgagaaaagttttttataaatttaatttattatgtttatttttgaatttaaaaagtttattgattgtttaaattttgaaattttttttatttttataaggttgaattaaaagtattttgttaaaggtagtagttatggtaaaagaaaaattattgttttgtagaaaaatttatttaatatttataattttttttaattagagattagattttgaagagaaaggtttatatatatatatatatatatatatatatatatanttttgtttttnttttttgttnntntttttntatttattgttattgtgattaaggatttatgaattaagattttttttttagtttttggtggtatatggtgatagtatgtttagagtaaaggtgttttttatgttttttttggggttgtattgattgtaggtattttttttttttatattttatattattgatattaaaaattttttttttttttttgtattgatgattttgtagttttaattagggtggtggtgttattttaaatgttattttggtatttagttttatagagtggggaaaatttttttatttgtttttttttgattgtttagttttttttaattaaaattttaattttataagtgaggaaatgagagtgttttttgtaggggtgtagtgagaatttaataaaatagtttaaggaaagaaaataaaaggtagtattgttgtattttttagatggtaaaaagtaaattattatgtttgtttaatatatattatttgttggttttttggtttagtaggttgaattgtgtgtttgggaattttttttttgttgtgtgtatttttttatgttatagggtggattttttttagagttttagtggagtagttggttaggttgatatgatttgataatattgtaggttattattattattttttattgttttattttttttttagg

SEQ ID NO: 217 - DNA, 8169 bp, Artificial Sequence
  chemically treated genomic DNA (Homo sapiens)
  unsure (659, 665, 667..668, 678, 689, 6034, 6123): unknown base
tttaggaagaaagtgagatggtgagagatggtagtggtaatttataatgttgttagattatgttagtttggttagttgttttattaggattttgaagagagtttattttgtgatgtaaaggggtgtatatagtgagaagaaaatttttaggtatatagtttagtttgttagattgagggattagtaggtgatatatattaaatagatatggtggtttgttttttattatttagaaagtgtagtaatattattttttgttttttttttttaaattgttttattaaatttttattatatttttataagaaatatttttatttttttgtttgtaaaattaagattttaattgaagaggattgaatagttaaagagaaataggtgagggaattttttttattttatggggttgaatgttaaggtgatatttagagtgatattgttgttttggttaaagttatagagttattagtataggagaaaggagggggtttttggtattagtggtgtgggatgtagagaggggaggtatttgtagttagtgtagttttagaagaggtatggggagtatttttgttttgagtatgttgttattatgtgttattaagagttgagggaggggttttagtttatgaatttttagttataatgatagtgggtgngaaaanannaataaaaagnaaaaataagantatatatatatatatatatatatatatatatatgaatttttttttttaggatttaatttttgattagaaaagattgtaaatattgaatgagtttttttatagaatagtggttttttttttgttatggttattatttttaataaagtatttttaatttagttttatggaaatagagaaaattttaggatttgaatagttaatgaattttttgagtttaggaataaatatagtagattaggtttgtaagaaattttttttataggtatattttaaatattagatagttgtttagggggattgttttagaagtattttaggttagatggaaaaagttttaggtattatgtagatagattatatagttggtttttggatagaggtaggaatagtataaggtaatgttatttttgtggtattaggtatagaaatttatatatgtttttaggtgatgatggtttttaaaatgtatttttttttaggtatagttatgattgtgttatgtataatattagaaagagaagagaggttttttgtgaatagtatattttttatataaattagtttgttttgttggttgtgtagttgaatatatatttttttagtattggggaaaaggattttttttagaatgtgtaagttttatgagagagtaatatgtttatattagagttttggtggtggtttttttttttttgttttttttttttgagttagggttttgttttgttttttaggttggagtgtagttatgtgattatgatttattgtagttttaattttttgggattaattaatttttttattttagttttttgagtagttgggattataggtatgtgatattatgtttagttaatttttttattttttgtagggatagggttttgttatgttgtttaggttggttttgaatttttgtgtttaagtgatttttttgtattagttttttaaagtgttgggattataggtgtgatataatatatttattttatattagagtttttatttgaaaaaaaaaaatgttgttgttggttgttatatttttagatttaatttgtttttaattttagtttggtttttttaagatagtgtgattttaagagtgttttaaatttaagtggtaaaatttaagtagatgattttatatttttgattaaagggggttagggaggttaatatagtaaatggggaaattgatataaaataaatatatatatatatttaaattatttatttttgtagtttttaggtaaaatttagtattttattttagtttatgagatgtggttagttgatattatttaatattaaataatgatattagttatttaaattttgggtataatttttttagtaatgatgatttttaatagaatttagtttaaaaaattaggagatttttgttatagtgatgtaattttttatattttatttattaataaaaattaataatttagttttttttaggtttttatgtattaagagttttttagttatagaaattttagttttgtttgtattttttataattattataaattttatgttagtattaagagttttagtaaagattaaatattttttggttattaatattttatattaggaaatgtgtattattaattattttgttttatattattttttgttttaggggatgtatgtataaatttatttatagaaaattggtaaagtagttgggtgtattggtttatgtttgtaattttagtattttgggaagttaaggtgggaggattgtttaagtataggagtttaagattagtttgggtaatatagggagattgttgtttttattaaaaagaaaataaaagaaaaaaaattggtaaaggatatatgtgataattgaagtttttagatgtgaagagaatttttatttttaggtagtggattttttttttttttatttttttttatattttttttatttttttaggttatttggttttaggttgagggggaggtgaaagtttttaggaattagagggtgtttaaatttagtggttgtgtggagtttaaggttttgttgttgttgttgtggtattagtttggtttatggatattattatgtatttgtaaggttaggtttttttttggtggttgtggtggttgttattttttttgtttattttaattttatttttatattatatgattttattattattttttgaatattagttatttatgtagttgtaatagtggatattgtgttaatttttaagtttgtatatttattaaattttgtttttttatattaaaaagtgttagttttttaatgggattatttaaagtgtagttgtaggatttgttaggagtgtagggttgtgggtggtttttgtgtaattgtgttaagaaagatttggttttagttttagggataatttgtttataaatttttattgtgtaatagtatttgttgttttgtttggtatttgttgtttttaagtatttttaaaaaagtgaaagaaagatttattttttttggaggtatgaattaagtagtttagaagataaatgtgttgtttggagagattgttgtggtaattaattggatattttaagagtttatttttttgtggttttatattttgatttgtgtataggagtggggtgtgggggtgtagggagtgtgggtaataggtatagattttgtttgtgtaatatgtggtaagaaattagttgtgaggggttggtttaatgtagagtggtgtgaggtttgtttggtatttataataattgaggggttagtttagaagtttaaggtggggttataggttggggaggaattgttaaattgtggatttttttttatttgttggaataagttttaggtaaaattttgttaataaaaattggtttaattgattttagatgaaagtttaaaagtagtttaatgtaggatagataattttttttataaatgatattgaaaagataggatatttatagatttttttttgttaaaaataatttttatataaaaattaagtggttagatataattgtgatgagtaaaattataaaatggttttaaaaaataataaattattgtttaaggttaggtaaaaggtttttaaattgatattagtggtaagattggtaaaaagaaatgttgatgaattagattttataaatttaaaatttttgttttgtgaaagattttgtaatgatattgaaaaggtttatttaggagaaaatatttataagttatatatttggtatataattagtatttagaatatgtaaataatttaaaaattaattatttttaaaaatttaattagaaaatagttagaagatataaatagatattttattgaagatatgtagatggtaaataattatatgaaaatttttaatgttattagttattagagaaatgggaatatgaggtttttgttgttttttgttttttattagggtgggttgagggtttggttttagtagttttgggtgttttttattttttgggtgtattgttattattttggtagaatttttgttgaatttttgtaggatgttttattgagttttgttagtggttaggaagtttgattgtgttgtttttttttttttttgtgttttttattgttagttttttttttaaatgtgtttgtgtttgttttttatatttttgagttttgtttggttttttttttttttgtttgtgaagttggtggtggatgtattgaaagtgtgtattattgtttattgagtgttttggggagtgtgtggaagttgttggtagtaggttttgatagtagtattttatgggtttagttgttgatggtagtatttggttttgtgtgttttagttagttgaggttagggtgtgtggtgtgggttattggtattgtttttttgttattataatttttttttttattaggtatttggtgtgtagaagtttaaagatttgtgaggtttagtttggtgtttgtaattttagagaataaggaggttgaggttaggagttagagattagtttgggtaatatggggagaatttgtttttattttaaaaaaatttagtttagtgtggtggtggttgtttgtagttttagttatttgggaggttgatgtgggaggattatttgagttttttatattaagggagattgaggttgtagtgagttgtgattagaggtattgtattttaagttgagtagtaaagtgagaatttgttttaaaataaattttaatttgattttggttatagtattatatgataggtagtagttttaagggtgattaaagtattttattttaaaatatatttttgatatattttggaatggttttgtgtaaagttattttttgtgagggaaatttgtgttttgtggataatttttttttttttttaggtttttttttgatttgggagagatttaattaagagtttgatattgtttaaggttatttattttttgaggtatatatgttatttattttttttgaagtatattataggttttatatatgtaataagaattttggtttttataattttttttttgttattattggttaaatttttttttttttaaaatgtattggttttttaggttaaattaatgtatattttatatatattgattgatgtttttgtttgtattttttgtttttttaaaatgtataaaagaaaattatagtttaaatattttggatatatgtttttaggattttttgatgttgtgttataggttgtggttatttatatttggtttagaataaatttttaaatattttatagagtttggttttttttattgggtttttttatttattttattggtattagtttatattttttttgtttaattatatttttatatggttgtttatattttattaattttaagttaaaaatagataattttttttatatgtttgggttattattttgtaggtttttatgtatatatattaaatatatttgtatgttttttttttaattaatttgttttttgtaggttgattttttagtgagtttttattgaagtttttttttggtttttgtattggtaattaatttaaattgttttattaaaatttgatttatagtttttattttattttattagaaaaataatttggatttaattgttttttataaattagtaagtttatatgttttattattttataattaaaattttaaaataaaagttagaagatttttatgtgtatatttgtttaaatatatttatatatatgtatatgtattatgttgtatgttatgtttatataataagatttagtgtggtaggttataattttttaagaaatgttaatttgattggtttaaatagatgggtattatantaaaatatagtaattaattttatttttttaggttatgtgatttaattttttaaaaagtaatgggtttatattggtgataaaataaatanaaatgttttttatatgttataaatattttgttgtgttattgtgttggggttatgtttttgttttttaagattgttggaaattttgatttaatgagttatagaagtttatatattagttttgaaattatagaaagaatggggggtttggattttggtaaaatagattatgggaggagaagaggaatttattgaggggtaatgaatgattggtgagagaatgattggattgagtaatagatattaatttgtaaatagttttttttggaatttaaataatttttggaggtagttattgtatttttataaaggtttgtttgggtgtggttatattttggtttttttttttttaatagatgagataataggaggaggagaattaataattgttttttttggtgggtttggttgttaggtagataaaggaattttagtttttttgggaaggatggtggggttggaggaaaagttagagagattttgaggtttttttagtttagtgtgttaaatattatgttttggtatattagtttttgagtattagtattggttagttttatatttgtttgtgttattaaggttatgaagttataaattaggtttaaagtaaagtgatatatatttatgtaattttttgataaataagattaatttaatattatttaataaaaatagttgtggttgggtagtgatttttatttgtaatgttaaaatttggagaggttaaggtgggaggattatttgagtttaggagtttgagattagtttgggtaatataataagatttaatttttataaaaaaatttaaaaattagttaggtatgtgtttgtgattttagttatttttaaggttgaggaggggggattttttgagtttagagtttaaggttagagtgagttatgattatattattgtattttagtttgggtaatagagtgagtttttgtttttaaggaaaaaaataaaagttgtattttttgagttatttatagatatttatgtatttaattttatggtttttatgtgggtaaatattttatgttaataggttatataattatttaatttaaaaaaatttgaaataatgattagttttatttaatattttaatttttgtaagaaatataggtataattgttaaaaaataaattaattgtaaatgaaataaatgtttataaatgaatttatgtaatttaaagttttaaaattttatgttaaattatatatataaaataaatgtttgtattatagttagataagataaaatgattggttattttatatttttaaaaaaagaaaaattataggattaagaggtaggggttaggaaaataaaaggtttaaagttgaagaggattaataaaggatgagttaataaaagaagttttatgtgttattgatttggttggaattaaaaataaattgtttgtgtgtttttttaaaaattaaatgtttttaggtaggggattaggggataggtattgatatagaattagagtttggttttttatatttaaaataataagattttttgaagtattatttgattttaataaaattttaaggggttttgatttttaaatttatattttgtttttaaataggtattttttttttgatatttatttaatttttttagttttgggttaaaaatgttgtttttttgatttaaagtggtaattttattttttgaggtatagttgttttttttttttttattttttaaatttatattgtagaagtttattttttatagttttttgttgtatatgatttgtaggttaatatgttattttttttattttttttttttttggagaaggtttgagatgattatttttttttttggttttttttggttttaatattgttgttttggtttgatattagaatatttattttgaaggtgtagaaaagtagtgtttttttttagtataatttaattttgtgtttttggttttttttgatatgtttgaatttttttatataattagaaaaagttattgtggtaagtaatagtatgttgttattaagaattatgtagtttt

SEQ ID NO: 218 - DNA, 2501 bp, Artificial Sequence
  chemically treated genomic DNA (Homo sapiens)
ttatatggttagaaagggtttaggtggtttttggtgtttttttagtttttgtttttatggtgtatttttttgttagttgtttttttttgtattttgttgtttgtttggtttggttgtgtgtggttttttgggagtttttattttgttgtggattttagtgattattaagtttgtatgtggtttgttgtaggtttgagtagaaggttttgtgtatatttattgtgttgtggttgtgtgggaggtttgtgttgtttgtgttatttattggttgggttttgtgggtgtagtggagtgggtgggtggttggtttggatgtgttttttttggttgtggttttgtgtgttatgtgtttttggtgggatgtgttatttttgggtttgttgtggtgtttttaatttgggttagggagtggggtggagggggtggttgggtggtttagaggagggtttttttttttttttttttttgaatgaattgtgtgatgttatgtataggaaattggttgggttgtgtagagaatgaagtaagaggataggtattatagttttgtttttgtttttttttttttgtgtttgtttttttgtgttgtttgtttgtttgtttgttgtgtttttgtttgttgttttttgtggttttgttgtgttgttgttgttgttgttgttagtagaaggtgttggggttttgggttttttttgttggtggttgttagtgtttggagtgggttgtgtggtgggagttttgggaggtggttgtagttagtgttgttgtgtaggattaggaggaggagaaagggtgtgtagtttggaggtggggtgtgttggtggggtgtagtggaagagggggtttaggggggagaattttgtagtagttattttttttaggaaaagagggaaaaaataaaatttttttttattatttttttttttttattttttgttgtattatatatagtgtgggtttttagtgtttggtattggtgggttaggtgtgttttgtttttatttatttagtagttttttggaaaatgtatttgttgtttggagtttaattagaagaggatttttgtttttgtttttggtttttttattgtttttttttttttgttttttttttggggaggtgtgaagtggttttgtggatagagatttatgtttgtgtttgtgtgtgtgtgtgtgtgtgtaaattgttgagaaggggaaaatattataggatttttgtgaatattggattgaaaattgtaatttatttgttgttgttgttgtttttttttttttttgagtttttgagatttttggttgggatttttgtggattgatatttttgtgaagtagaagtttgggaattgatttggaaatttttttaatttttattttttttttttgtgatttttgatttattgggaagttttaaattagttataattggagagtgttgaagattgatgggattgttgttttatgtatttgttttggttttataaaaaggaaatttgatagaggattatgttgtatttaaaaaatataagtaagttttttgtataggaaattggtttaatgtaatttttaatggaaatttttgagattttttatttaaagtgtatttgagtaaatttaatttttaggtagtttaatatattttttttagttgtgttatttgtagtgtgtatgttttgtttttatttagtgtgtatagggaaatgtatttgattttttatttattagtttgttttttttttaattttttagtattatagaggaagtagattgatattaataatatttattaataataatgtgttttatgaaataaagatttgaaaggaattggaataaaaattttttgtattttatgttaagggggaaatattagaattaagtgttttgtgtgattgaagatatttttttgtttaagaatgtaaagtatatttaataaaatagttggattataattttttttttttttttgggggttgtggggtgggagttggggtgagaggtgttgttggtttttgttgttttttttttgggaaggatggtgtatgttgggagaatagggtatgataattgggagatagtgatgaagtatatttattataagttgttgtagaggggttatgagtgggatgtgggagatgtgggtgttgtgtttttgggggttgtttttgtattgggtattttttttttttagtttgggtatatgttttatttagttgtattttgggatttggttgttaggattttgttgttgtagattttggttgtttttggtgttgttgtggggtttgtgtttagtttggtgttatttgtggtttatttgattttttgttaggttggtgatgattttttttgttgttattgttgtgattttgttgagatgtttagttagttgtatttgatgttttttattgtgtggggatgttttgttatggtggtggaggagttttttagggatggggtgaattgggggaggattgtggttttttttgagtttggtggggttat

SEQ ID NO: 219 - DNA, 2501 bp, Artificial Sequence
  chemically treated genomic DNA (Homo sapiens)
atgattttattgaatttaaagaaggttataatttttttttagtttattttgtttttgaagagtttttttattattgtggtaaagtgtttttgtgtggtgaagggtgttaggtgtagttggttggatattttggtgaagttgtggtggtagtggtgggagaagttgttgttggtttggtggagggttaggtggattataggtggtattgggttgagtgtaggttttgtggtggtgttgggggtagttggggtttgtagtggtgaggttttggtgattgggttttgggatgtggttggatggggtgtgtgtttgggttgggaggagaagatgtttggtgtgggggtggtttttgggggtgtggtgtttatattttttgtattttatttgtagtttttttgtgatagtttataatggatgtattttattattattttttggttattgtattttgtttttttagtgtgtgttattttttttagaggaaaagtaatgggggttaatggtattttttgttttagtttttattttatggtttttagagaaagaagaggagttataatttagttattttattggatgtgttttgtatttttggatgagggggtgtttttaattatgtggaatatttgattttggtgttttttttttggtatgagatgtaggaaatttttattttaattttttttggatttttattttatgaggtatgttattattagtaagtattgttaatattagtttattttttttgtgatgttgaaaggttaaagaaaaaataaattaataagtaaaaaattaggtgtgtttttttgtatatattgagtgaaagtagggtatatatattataagtaatatggttaaaaagaatgtattaagttgtttggaaattaaatttatttgaatgtattttaagtaaaaaattttaaaggtttttattgaaagttatattaaattaattttttgtgtagagaatttatttgtattttttaagtatagtatgattttttgttaagttttttttttgtaaaattaaaataaatgtataaggtaatgattttattaatttttagtattttttagttatagttgatttgaaattttttaatgaattaggagttgtggggagagggagtaaaaattaggaggatttttagattgatttttagatttttgttttatagaaatgttaatttgtaggaattttaattggagattttaagagtttgagaaaaaaaaaaggtagtggtggtggtagatgaattataatttttagtttggtatttgtagaagttttgtgatgtttttttttttttggtaatttatatgtgtgtatatatgtgtgggtataggtatgaatttttatttatgggattgttttatgtttttttaggagagagataggggagaggggatgatgaaggagttggggatggaggtaggaatttttttttgattaaattttgaatagtaaatgtattttttgaaaagttgttggataaatgaaggtaggatgtgtttggtttgttggtgttgagtgttagaagtttgtgttgtgtgtggtgtggtgaggggtggggagaaggaggtggtgggggagggttttattttttttttttttttttaaaaaggatgattgttatgaagtttttttttttggatttttttttttgttgtattttattggtgtattttgtttttgggttgtgtatttttttttttttttttggttttgtgtggtggtgttggttatggttgttttttggagtttttgttgtgtagtttgttttgagtgttgatggttgttggtagggagggtttggagttttggtattttttgttggtagtggtggtggtggtagtgtggtggggttatggagagtggtgggtgggagtgtggtgggtgggtgggtaggtggtgtggaggggtgggtgtgggaggaagggggtgggagtggggttgtggtgtttgtttttttattttattttttgtatagtttgattggttttttgtgtgtaatgttatatggtttatttaaaaaaagaagaaagaaagagtttttttttgagttatttgattgttttttttgttttgttttttggtttgggttaaaggtgttgtggtaggtttgggagtggtgtgttttgttgggggtatatggtgtgtggggttgtggttggggagggtgtgtttgggttggttatttgtttgttttgttgtgtttgtggggtttggttagtgggtggtgtgggtggtataggttttttgtgtggttgtggtgtggtgggtgtgtgtggggttttttgtttaggtttgtggtaggttgtgtgtggatttggtggttgttggggtttgtgatggggtgggggtttttggggaattgtatgtggttgggttgggtggatgatggagtgtggaggggggtggttggtgggagggtgtgttatgaaaataagggttggaaaagtgttgggaattgtttggattttttttggttgtgtga

SEQ ID NO: 220 - DNA, 6277 bp, Artificial Sequence
  chemically treated genomic DNA (Homo sapiens)
gtgtgttaagattatgttattgtatttttgtttgggtgatagagtgagattttgttttaaaaataaaataaaaaattggtttggtgtggtggtttatgtttgtaattttagtaatttgggaggttgaggtggaaggattgtgaatttaggagttgaagattagtttgggtaataaagttggattttgtttttttaaaaaaattaagtttaattaaatatttttaaaaataataaattagttattagaattataaatttgtattgtttttgataatgtaatgtattgttttgtaaaatattataattaagattgttattttaaggattttgaagtttgtgaagattaggtatttttttgaaattttaagataattattttttagttttttttattttttgtttttatttagaattaagtttattattaaaatgtagttttgttgatgttaagtatttatttatatgatatgtaattattggggttgttaaaatttgggtagaatttttgttaatttattaggattttaggtaaaaaattaggaaaatgaagtgattgatttagtttgttaaaagtggatattttgaaatattattttttaattttaagaaatattttttgttaggtgtggtggtttatgtttataattttagtattttgggaggttgaggaaggtagattatgaggttaggagattgaggttattttggttaatgtggtgaaatttttatttttattaaaaatataaaaaattagttgggtgtgatggtgggtgtttgtagttttagttatttgggaggttgaggtaagagaatggtgtgaatttgggagatagagtttgtagtgtattagttgtgattgtgttattgtattttaggttgggtgatagagtgagatttagttttaaaaaaaaaagaaaaaaaagaaatatatttttttatttgttagggaaattaatttttgttttttttttttaaattatataattggaaattaatttagatattttggagtttttttagttggtgggttaattaagagaaaataggaagtgggagattttagtttagttggattatatttaggtttttataaggaattttttttggttggtatgtaaaaaaatttttttagtaagagtattaattttgaatgtgtgtaaatatgaaagttatggttaattttatttgttttttaggtttatagttagtagagttagatagttgggttttaggtttttagtttttataattgatattattgttaagtttatgtgattgatttattttgttttggtataagttagttttttttttatattgattttttttttttttagttttaataaaatttttttaatgaaataaatttggtaatttgaattttggttattgtttttattagaggtttgtataagttaagttatttaagttgaggttgggagtggtggtttatgtttgtaattttagtattttgggaggttaaggtaggaggattgtttgagtttaggagtttaagattagtttgggttggtttttgagaaagtgagattttgttttgaaaaaaaaaaaaaaaagtgtggtttgaaagttgagtgtttgataaaaaggagaaatagtgtttttttaaaattaaaggtttttaattaagatttttttaatggggttttgaaaaaaggagaatgggatgagaaggatatatgggtagtgttattttttaatttgtagattttattttagttttttagttattgttttttagtattttatgtttttaagatagtgttattattttaaggatttttttttattttttttgtttgggttttttttttattgaggagttgtggttttttattagtagaagttggatgtttttgtgtttgaaattggtgggtttttggttttattgattttaagaatgaagttgtggatttttatggtgagtggtatagtttttaaagatgatgtgtttagagtttgttttttttgatgtttggatgtgtttagagttatttttttttggtggatttgtggttttgttggttttaggagtgaagttgtagatttttgtggtgagtgttatagtttttaaggtggtatgtttggagtttgtttgttttttttgtttggagttgtttattttttttggtgggtttgtggttttgttggttttaggagtgaagttgtagatttttgtggttggtgttattagtagataaatgttatgtggatttaaagagtgagtagtagtaagatttattgtaaagagtataagaataaagtttttatagtgtggaaggagattagagtgggttgttgttgttggtttaggtagtttgtatttttttttttttttttttttttttttgagatggagtttttttttgttatttaggttggaatgtagtggtgtaatttgggtttattgtaagttttgttttttgggtttatgttatttttttgttttaatttttttagtagaggggattataggtatttattattgtatttagttaatattttgtttttttagtagagttggggttttattgtgttagttaggatggttttgattttttgattttgtgatttatttttttaggttttttaaattgttgggattataggtgtgagttattggtatttagtggggtagtttgtttttatttttttatttgattttatttatattttgttgattggtttattttatagagagttaattggtttgttttgatagggtgttgattggtgtatttataatttttgagttagatatatatagagtgttgattggtgtatttataattttttagttagatataaaaattttttaagtttttattatatttgttagatatagagtattgattggtgtgtttataaatttttagttagatatagagtgttgattggtgtatttgtaaattttgagttagatatagagtattgattggtgtatttataattttttagttagatatagaagttttttaagtgtttattagattagttagatatagagtgttgattggtgtatttttaaattttaagttagatatagagtgttgattggtgtatataaaatttttaggttagatataaaagttttttaagtttttatttgatttaggagtttagttggttttatttagtggattttgtgtagggttgtgttgggtgtttgtattttttttagtttttgggtagttgatgggattgggtgttgaggagtagggggtggtgtttgttggggaggtttaggttatgttggagtttataggggttgggagggggtttgggtatggtgggttgtaggttttgagttttgttttgtgtagggtggttggggtttggtgagaatttaagtggggtgtaggtgggttggtagtgttgggggatttggtgtattttttgtagttgttggtttgggtgttaggtttttgattgtttggggttgggggtgtggggtttgttgagtttgtgtttatttggaatttgtgttggttggtgagtgttgtgtgtagttttagtttttatatttgtttttttttttatatttttttgtaagtagagggagttggttttggttttggttagtttagagaggggtttttatagtgtagtggtgggttgaagggtttttttagtatggttagaatggatgttaaggttgaggaggtgttgagagtgagtgagggttgttagtatgttgttattttgtattttgaattatagattttttaattttttggtgttttttgtttatttggttttttagaatatgaagggtttttttattttgttattaaaatgattagttgtttggagatatggaaaaagttgttttttttttttgtaggattttttttttgaatttttttaaatttttttagtgtgatgtgattttatttttagttaatttaggttgtttttttattagttttttgttttttggggaggtggtaatgtaaagattgtttgttgttagttttgttgttatttttgtggggtgaatttaatatggtggataaagatagtaattagttttgtttttttgtgtttttgttaagaagattggtttttattatttgttttttaaaatgattattttattgattggtggtgattgtgttgatggagatggggtaaaagtaagttgaatttgaaaaataataaatattggggttgaggggtggaattatgagtgtgtagatatgggttagagtgtattttttttgttttaggtaaatttggtgtttattgtgtttttgtaggttattgattttataagattatttgttttagatttttggggttggatgggaattgtagtttttttaaagagttgtatgtatttttttaaggtttagtttttgtttttaaaatatgaaaatataatattttagtttataattgttgataagtataagtgtgtataggtttttaatttatttattggatttttgtgagaattgtgtttgttttggtattggatgtttttttttataagattatagtttttaaggaatattgtggtgaagattttttattttgtaatgtatgttggaaataattatttttttttatttttttaataatttttattatttatatttattgaaattggagatttttattagggtggaaagagtgggggattgggatttttttttatgattgttttggataataggtagtgattttgatttttgtatagtaattattgtgatgtaataagttgtaattggaagagtagaggttagagggtaggtattttatggtaaatttaggtagaatttttttttttttgtttttttttttttatgttatttgggggtagattgggtggttaatttagagttttgagagatgtttggttttttttgttttttttattttttgattgtattttgattttgtattttgagaggttgttgtttagtggtagttttttggtttttgtggtaatggaaaagtgtgggaattatagataaattaaaattgtgattgtgtggtgtgagtttgttgagattttttggatgggggataggttgtggggttttttagataattgggtttttgtgtttaggaggtttttattttttgttttgggtaaaggtagtagagttttgggaaagggatagggggtttaagtgatgttttggggtattggtgtgggagagtggatttttgaagttgatagatgggtattttttgatggggggtaggggtggaatttgagaggtgtaaggtgttgtgaattttggggaggggggtagtttgtaggttgtgagggaagtgttgaggattaggaagggggtattgagtgtttgtgggggaatttttgtgataggaattggaatatgttttgagggggatattatgtttttaaaaatgttggttggttatgaggttaggagttttagattagtttgattaatgtggtgaaattttgtttttattaaaaatataaaaattagttgggtgtggtgttgttttagttatttaggaggttgaggtaggagaattgttagaatttgggaggtggaggttgtagtgagttgagattgtgttattgtattttagtttgggtgatagagtgagattgttttaaaataaaataaaataaaataaaataaaaaatattggttggtatgtatgagaggatgggattttgtggaagaagaggtgttaggaatatgtttgggaaggggaggagataggattttgtgggagggagaatttaagaattggatttatttgtgttattgagaaagtgtaagagggaagtagaggagtgttagtagtaatagatgttgttggtagggatgtgtttgaggaggatttagagatgagagtaggttattgggaaaggttaggggtggggaggttttgattggtgttggtttggttgttgttgattttggttttatgtaagaaaaagaaaataattagaaatattggagaaagttaaggttattattatttatttggttagttatttttttgtagtttttttttttttggagaaaggaaaagatttaaggggttggtagtaatatgtgaaaaaatttagaatttatgttgtttaattataaaaagtaatttttagaatttttaaaaataaaggatgttgttattagttttttggtttgtattattttaaaattttttaaattttaaatttattttattttaaaatgataaaatgaagttgttattttataaattttttaaaaagatatatatatatgtttttttaatgtgttaaagt

SEQ ID NO: 221 - DNA, 6277 bp, Artificial Sequence
  chemically treated genomic DNA (Homo sapiens)
attttaatatattagaaaaatatatatatatatttttttaaaaggtttataaaatgataattttattttattattttaaaataaagtaaatttaagatttggaaggttttagaataatataaattaaagaattaatgataatgttttttatttttaaagattttagaagttgttttttgtaattagataatataaattttgaatttttttatatattgttgttaattttttgggtttttttttttttttaagaaagagaaagttatagaggagtgattgattgggtaggtggtggtagttttagttttttttaatgtttttggttgtttttttttttttgtataaaattaaaattaataatgattaaattaatattaattaaggtttttttgtttttaattttttttagtgatttgtttttatttttggattttttttaagtatatttttgttggtagtatttgttattattgatgtttttttattttttttttgtgtttttttaatggtgtaaatggatttagtttttaagtttttttttttataaaattttgtttttttttttttttagatatatttttggtatttttttttttataaggttttatttttttatatatattagttggtgttttttgttttgttttgttttgttttgttttgagatagttttgttttgttgtttaggttggagtgtaatggtgtgattttggtttattgtaatttttgttttttgggttttagtgatttttttgttttagttttttgagtagttggagtggtattatgtttggttaatttttgtatttttagtagagatggagttttattatgttggttaggttggtttggaatttttgattttatgattagttgatgtttttaaagatatagtgttttttttaaggtatattttagtttttattatgaggatttttttatggatatttagtgttttttttttgatttttagtgttttttttgtgatttataaattgtttttttttttagggtttataatgttttatgttttttaggttttgtttttattttttgttaaagaatatttatttgttagttttggaaatttatttttttatgttagtattttagagtattatttgggttttttgttttttttttgggattttattatttttatttagagtagagggtgaaggttttttgagtgtaggggtttagttatttgagaaattttatagtttgttttttgtttaggaagttttagtgagtttatgttgtgtagttgtagttttaatttatttgtaatttttgtgtttttttgttgttatggaaattaaggggttattgttaagtagtagttttttagaatatgaaattaaggtataattagaggatgggagggatagaaagagttaagtgttttttggggttttggattggttatttagtttgtttttggatgatgtaaaaggaaagagatggaagaggaagaattttatttgagtttgttataaagtgtttgttttttagtttttatttttttagttgtggtttattgtattatagtaattgttgtatgaaggttagaattgttatttattgtttaaagtagttgtaagaagaggttttaattttttattttttttgttttaatggaggtttttagttttggtaaatataagtaataaggattgttgggggggtggagggaaataattatttttagtatgtgttgtggaatgaaaggtttttgttatagtgttttttagaaattgtagttttatggagaggaatatttaatattagagtgggtataatttttatggaaatttagtggatagattggagatttgtgtgtgtttgtatttgttaatagttatggattggagtgttatgtttttgtattttgaaagtagaaattaggttttaaaaagatatgtataattttttagggagattataatttttatttagttttaggagtttggggtaagtagttttgtaaggttagtggtttgtggggatgtagtgagtgttgaatttgtttggggtaggggaaatgtgttttggtttatgtttgtgtatttgtagttttattttttagttttagtgtttgttattttttgggtttagtttgtttttgttttgtttttgttgatgtaattgttattagttaatggggtggttgttttgagggataagtggtaagagttaatttttttggtgaaaatgtggagaaatgggattagttattgtttttgtttgttatgttagatttattttatagagatagtggtagagttggtagtggatggtttttgtattgttgtttttttagggggtgggaagttggtaaggaagtagtttgggttagttaggggtggggttatgttatattaagagggtttggagaagtttaagggaggaattttgtaaagaagaggggtgattttttttgtgtttttggatagttaattgttttagtgataggatgagagagttttttgtgttttgagggattgagtgggtgaaaagtgttggagagttggagagtttgtggtttagaatgtgaggtgataatgtgttagtagtttttgtttgtttttggtgtttttttggttttggtgtttattttggttgtgttggaggagttttttagtttgttattgtgttgtgggggtttttttttgggttggttgaagttagagttggttttttttgtttgtggggaagtgtggagggagaggtgggtgtgggaattggggttgtgtgtagtgtttgttagttagtgtgagttttaggtgggtgtgggtttagtgggttttgtatttttggttttgggtagttaggggtttagtatttgggttagtagttgtagagggtgtgttgggttttttagtattgttggtttgtttgtattttgtttgaatttttattgggttttagttgttttgtatagggtaaggtttaggatttgtagtttgttatgtttgagtttttttttaatttttgtgagttttagtgtggtttgagtttttttgatgggtattgttttttgttttttagtgtttggttttattgattgtttaagggttgagaggagtgtaggtgtttggtatagttttgtgtaggatttattaggtgaagttagttgggtttttgagttagatggggatttggaaaatttttatgtttagtttgaggattttatatgtattagttagtattttgtgtttagtttggggtttggggatgtattaattagtattttgtatttagttaatttggtgggtatttggagaatttttgtgtttagttaaaggattgtaaatgtattaattagtgttttgtgtttagtttaaggtttgtaaatgtattaattagtattttgtgtttagttaaaggtttgtaaatgtattaattagtgttttgtgtttagtaaatgtagtggggatttggagaatttttatgtttagttagaggattgtaaatgtattaattagtattttgtgtatatttagtttagggattgtaaatgtattaattagtattttgttaaaatggattaattagttttttgtaaaatggattaattaataggatgtgggtggggttagataagggaataaaagtaggttgttttgttgggtgttagtggtttatatttgtaattttagtaatttgggaggtttagaggggtggattatgaggttaagagattgagattattttggttaatatagtgaaattttgattttattaaaaagataaaatattagttgggtgtggtggtgggtgtttgtaattttttttattggggaggttgaggtaggagaatggtgtgaatttgggaggtggagtttgtagtgagtttagattgtattattgtattttagtttgggtgatagagggagattttattttaaaaaaaaaaaaaaaaaaaaaaaaaaatgtaggttgtttgagttagtagtagtaatttgttttggtttttttttatgttgtggaagttttgtttttgtgttttttgtaataaattttgttgttgtttattttttgggtttgtatagtatttatttgttggtaatattgattgtagaggtttgtagttttatttttgaagttagtgagattatgaatttattaggaggaatgaataattttagatgggaggaatgaataaattttagatatgttgttttaagagttgtaatatttattgtaaaggtttgtagttttatttttgaagttagtgagattatgaatttattagaaggaggtaattttgaatatgtttgaatattagaaggaataaattttggatatattatttttaagaattgtattatttattgtgagggtttgtaattttatttttgaagttagtgagattaagaatttattaattttggatataagaatatttggtttttattgatggaaggttatgattttttagtagaaagagggtttaggtaaagaaaatgagagagagtttttggggtggtgatattattttgggaatatggagtgttaggaaatgataattggaagattaggatgaaatttgtaagttaaaaaatgatattatttatatattttttttattttatttttttttttttgagattttgttaaagagattttggttagggatttttggttttggaaaggtattgttttttttttttgttaaatatttaatttttaggttatattttttttttttttttttgagataaagttttgtttttttaaagattagtttaggttggttttgaatttttgagtttaagtgatttttttgttttggttttttaaagtgttgggattataggtatgagttattatttttggttttagtttggataatttggtttgtataggtttttggtggagatagtaattaaagtttgggttgttaggtttgttttattaaagggattttgttgaggttgaaagaaaaaaaaattgatgtggaggaaaagttaatttgtgttaagataaggtgagttagttatatggatttaataataatgttaattatgaaagttgaaggtttaggatttagttatttgattttattggttgtagatttaaggagtaggtagggttaattatagtttttgtgtttatatatgtttaagattaatgtttttgttgaaagaatttttttatatgttagttaaagagagttttttatggagatttggatatggtttagttaagttagaattttttattttttgtttttttttagttggtttattagttggaggagttttagaatatttaaattaatttttaattgtgtaatttgagaaaaagagatgaagattaatttttttaatgagtagggaagtgtgtttttttttttttttttttttttgagattgagttttgttttgttgtttagtttgaagtgtagtggtatgattgtggttagtgtattgtgaattttgttttttgggtttatgttatttttttgttttagttttttgagtagttgggattataggtatttgttattatgtttagttaattttttgtgtttttagtagagatgggggttttattgtgttagttaggatgattttgattttttgattttgtgatttgttttttttggttttttaaagtgttgggattataggtgtgagttattgtatttggtaggaagtgttttttaaagttggaaagtggtattttagaatatttgtttttggtagattgagttagttattttatttttttgattttttgtttaaggttttggtgaattgataaagattttgtttaaattttaatgattttagtaattatatgttatatgaatgaatatttgatgttagtaggattgtgttttggtggtgaatttggttttaggtagaaataaagaatggagaaaattgggggataattattttagggttttaaaaaagtgtttgatttttatagattttagggtttttaaaataatagttttaattgtagtgttttatagggtagtgtattatattgttaaaaatagtataggtttatggttttaatgattggtttattatttttaaaaatgtttaattgaatttaatttttttaaggagatagggtttggttttgttgtttaggttggtttttaatttttaggtttatgatttttttattttagttttttagattgttaggattataggtatgagttattatattgggttaattttttattttatttttgagatagagttttgttttattatttaggtgggagtgtagtggtatgattttggtgtat

SEQ ID NO: 222 - DNA, 6104 bp, Artificial Sequence
  chemically treated genomic DNA (Homo sapiens)
tagttttgaagtaggtagatatgtttatatttttttttgagttagtgtttggatttaggggattagattttttatttgatatggtagagagataagttatgttttaggtttttaaaaggagtttggaaaatataattaatttaagttaaatatttttattatttttttgtatatataataaagataaaaatatttattttattaaattgttgagagtaagaaagataatatatatatagtgtttggtatatggatggaatttagttgatggtagttataatatttataatattttttttttgttttaatttaatatgatttatatgattttttatatttattgtatatgtaatattttttagataattttatatttaggttattagtaaaatattgatattttttttagtatttatatagatgttttttttttaaagtttttagtaaaatttttattggggaattttagttgttttttatttttttttttttttatttttatttttatattaaaggtttttatttttaaggtatataatatgatattttgatatatgtatattttgtgaaatgattgtaataattaagttaattaatatattattattttatatagttttttgtgtgtgtgtgtgtgtgtgtgtgtttagagtttttgagatttattttttttgtaaattttaagtatatgttaattatagttattaggttgtatattaggtttttagaatttatttattttataattgaaaggttgtattttttaattagtattttttttttatttttaattgtagttttaaataattattattttaatttttgttattgagtttgatttgttttttgagattttatatataagtgagattatgtattatgtgtttttttgtgttttatttattttgtgtgttataatattttttaggtttagttatgttggtataaatgataatattttttttttttgaataatattgttgattaatattttattgtgtgtgtgtgataaatatatattatattttttttaataatttatttattaatggatatttaggttgtttttgtattttggttattgtgaattttgttgtttttttggtagttatttttgtatttttttttttagaagtagttttattgtagtttaaaagtgttttaggaaaatgatttagaagtaattattttttttggtatgttttttagtaaatatgatgatggaaagttttgatttttgtttttttttaaatagtgtaattgatttttagttgggattttttttagttaatttgatagttttatgtttttattaggttgaagaaaatgtatgtgttgtgggttgttgtattattgttgttggtggtgttgttgttattgttgagattttgtggttgagtttatattataaaggaattgtagagtagtaataaatttaatttgagttttgaatttaagtttttaggtgtgatttttttaattatgtggaaatttatgtaagaatttttaattagattttatgtttatttttattttttaagtaaagggtataggaatttggtttaaatgaatgggaataaatattatagttagattttattggagtgttgtaaaaatgtttttttttaaaattagattgttttaaaattgattttggtttttagatttttaagttaggaagtaagatagtaaaaattaagggttaaatagttaagtgattatttttttaaaattagtattttttttggtgatttttgttagattatgttttgtttagtattgaaatttagagaagttttaggaatagtgggatgaaatttaagtgatttgtttatgggaagttttattttttttttgtttgtttagtaaatttgggatgggtttagagaatgattttgtattttgtattagaagattttagtttttagagagaattttagatgaaatttttatttttttgttttatttttgaaaatttttatttgggaattgatttgttgtgataaataaaatgggaggagtttggttgaatagtttgtggattttggaaagtaaagtgaaatgttgttttaattaggtttgaattttttgtaagttattttgtgaaattggtgaatttgttagaatgaatttttatttatttaattttggtggattgtttattagggtgtttggtatggtgttaattgttggagaaaatgatttttaaataaaaatgaaaaaaatttttggtttttagtaaggagttaggtaatttttataaatttaaggagtgtttgagaggtgagttaatgattgttttttttgttttaaagagatagatttttatagttagttttgaaattgtttggggttatattagtgttttttggatgtagattttggttagtgttttatggtattagtttttgatttgtagttgttaaagatttgatagtggggagtatgtgtttattttgaaggttgaagatatatattatagttaggagtagaattttgattttttaaagtgatatggttataaaatttgtgtttattggtttttattttgtggttattgtggtatgggtgaaagttatgaattttttttttaggaaaatatatattatagatatatatatttataaatggttttaggaggtttttatgttagaaatttttggttttggaaaaaaattatttttgttgaagtatgtggtagttgagtgtaaatatttttttgttatagttttagtggtagaggtttaagtattatgttttatttagtgtttgtattgtggtttttgtaattttttaagtagttttgtattgaaaatttaggttggagatttgagtttaaattgttgaaaagttttaaggttttggatagggttttagtaggggttatttttttttaggatttggggtttattgtgtttaagatttgttatttaagttttgttttgtgtgtatgttgtttgttttatgttttgtgttgatatgtgttggtgtttttttgggttagttttagttttgggttttgtggttgttttgttggtgattttgtggagagtgagttttagatatttagtttttagttttgagttgttatttttttgttgtagttaagaaggaggagattaattaagggtattttagaagttaggtgtttttgttgttttttttgagtatggaggttattaattttttagggggaagagatgtagtgtgaggtaggggtgttgtgttaagaaattttgatgtttttggggattgaggataaaggtgtggatatgattttggggtatttggagttttgtgatttgtgttatggatggtatatttaggggttaatttttgttttgttttaaagaattttaagttagagtttttgtttttgtttatagttttgggatgttgttgttgtgtttattgtataggtagtgtttggattggttgtagtagattgtgtgttgtgtgttttattgggagatggtggagatgttgaaaagttttttttttgttattttggatgttgtgggtggtaagtgttttagtttttatttttgttgagttgaatgtttaggtatagtggaattgaaatttggttttgtgggatgtgagagttgttgaggttatgtgtaattgggtgtgatggagggtgtttgtttgtgatgtgtgtaggtttgatgtaagtaggttattgttgtgtgagtgtgtggatgtgattgtttgagagatttggaggtaggtttgggatatgtttgagtgaatattttaggatatttttttggttagtatttgttttttagtgtttgtgatttagagtgggtatatgttgggagatagtaatgggtttgggtgtgtgtaaatgagtgtgattggaagtgagtgtgagtttgatttaggtagggattatatagtattgttatatttgtttgttttttagtagaggattgaagtgtgggggtgggggtatggggttggaatagaatgtttttgggatattttggtaaatagtagttggaagtaaaggggtagttgtgtaaatggtttaggtaggtgatggatggtagggtaggaagggggaggtttagaggtttggatggaggtttttgtatttgtattttgtaatttattttttaggtttagtaggttattggttttttttttatatatgtaatggatttgaagagtattttgggatagtttggggagatggagatttggaaagtatttatggagattttatagaattttttgtgtggattaggaaatttttgtagatttttgtttatttgaggtttaggtgttgggttgttttttataatatttttttaagatgagattgtggtttttattttaaagatgagtatattgagtttttgtgaagttatttgtttatgattatataattaggaattgggttaattgtaattgaatttttgtttaataaagtttttgtttttagttttgttttttgttttttatgagttttggttttttgtgggtaatattagttattggagttagattttttgggtttagaatttatttttaggggtattaatttttaaaattttatttgggtaggggtttgggattagagttggaagagtttttataattttggattttttttgttaaattgtgaaattaggggtggagtggggtgagggtttaaaattaggttggattgagaggtgaaatttattatgatgttaaattgtttttaaatttttgtttattttaagggtgttatttgttggtgtttttattattttttattatttttattaatgattttaatgtaaatataagtgggatggttttgttggattttttaggttttggaagtatgagggtgatgtaatttaggggtaaaggatttttttgtttattggttgttgtgtattggtggaatttttttgatttatagtggtgggaataagagtagttgttggtgttgggaggtattagagatattgtttagtttaagtgttgttgttgtttttatagggttttgttggatgttgttgttgttgttgttattgtttttgatttaagttattttttgttaggtgagttttgagattttggtttaggtatatgtttttttttttttttttttttatttgttatttttttattttttttttttttttttttttttttttgttagtttttttattagatagtttttgttagtttgtgatttatattaggtttgtgttttaggttggattggatagttttaattttttggtttgttttttttgtttggttgtggattttagttttatttttttgtattgtatataggtttaggttagttttgggatatttaggttttttagggattgtgtatagagtttgaggtaagagaaattttttgtagatggtgtgattagggatggtgtttggagtttagtagttttagggaaattggtttagaatttggaatagagtggatgggtggtaaataggtatgatgattgagggataagtagttttaaattgtaagttttagttataggttttgggagtaaagagagaaagttttgggttttaatttaagagtaaaatttggtttttgtaggggattgaggtgttagtaggtggagtttaggttgagtattaaaattgatttttttattttttagattttaattgtagagataatttttgtggatagattttattttttttattaaggtgtatgtaaaagttttagaagaggaggatagttttgggtttttttatgggattagtttttgtgataggggtttgggagtatgttttttatagagatttggttaataggtttatatgtatttgtgtggttttggggagaagggtaggattgagattttttttatttagttttttttttaggattgtttttttagttttattagattgtgtatgttataggtttattgaattttttagaagtttattgtgttgatgaggaaataaaaaagaagagaaatataatgattagtttgaagttataaagttagagtgttagaagtaagatagaaaattaggataggagttaaggtttgtgggtttttagaattttgaattggtgtaggtggtttattttattttttttttgtaga

SEQ ID NO: 223 - DNA, 6104 bp, Artificial Sequence
  chemically treated genomic DNA (Homo sapiens)
tttgtaagggaagaatgagataaattatttgtgttagtttgaagttttaggagtttatagattttggtttttattttggttttttgttttgtttttaatgttttggttttgtggttttagattggttattatatttttttttttttttgtttttttattagtatagtggatttttgggaggtttagtgggtttgtagtatgtatagtttgatagagttggaggagtgattttagagggagagttgagtgggggaggttttagttttatttttttttttaaagttatatagatatatataaatttgttagttaggtttttgtggaggatatgtttttaggtttttgttatagaagttgattttataaggaaatttagagttgttttttttttttggggtttttgtatatattttggtgggaggggtgggatttatttatagagattatttttgtaattggaatttgagaaataaaagaattaattttagtgtttagtttaagttttgtttgttggtattttagttttttgtaggaattaagttttatttttaaattgggatttaagattttttttttttgtttttagagtttgtgattggggtttgtagtttagggttgtttgttttttagttgttgtgtttatttgttatttatttgttttgttttaggttttgaattaatttttttgggattgttgggttttagatgttgtttttgattgtattgtttgtggaaagttttttttgttttaggttttgtgtgtggtttttggggagtttgagtgttttgagattggtttaagtttgtgtgtagtgtgagagagtaagattggagtttgtagttgagtaggaagagtgagttgggggattgagattgtttgatttaatttagggtatgagtttggtataaattgtggattaatagagattatttgatgaagagattaatggagagagagggagaggaggaaagggagtgagaaaatgatgaatggagggagagggagggagagatatatatttgagttaggattttggggtttatttggtgggaggtggtttggattagaggtggtggtagtggtggtggtggtgtttagtagagttttgtggaagtggtggtgatatttgggttgggtagtgtttttgatgttttttagtgttagtgattgtttttatttttgttgttgtgggttgggaaagttttgttagtgtatagtaattaatgggtggaggggttttttgtttttgggttgtgttatttttatgtttttagaatttggaggatttagtaggattgttttatttgtatttgtattgaggttattgatggaaatggtgggggatggtgggggtattaataagtaatgtttttaaagtgagtgggaatttgagggtagtttgatgttatggtgaattttattttttagtttggtttggttttgaatttttgttttattttatttttggttttatgatttggtggaaagggtttaggattgtagggatttttttaattttgattttagatttttgtttaagtgagattttaaaggttaatgtttttaagggtgggttttgggtttaagaaatttgattttagtagttggtattatttatagagggttagggtttgtgggaaataagagatggagttgggagtaagaattttgttagataggagtttaattatagttggtttaatttttggttgtgtgattatgggtaagtaattttatagaggtttagtgtatttatttttgaaatggggattataattttattttgaaggaatattgtgagaaatagtttagtgtttgggttttagataggtagggatttataagagttttttggtttgtataggggattttgtaagatttttatggatattttttgaatttttatttttttggattgttttggggtattttttagatttattatatgtgtgaggagggggttgatgatttgttgggtttgaggggtgagttgtaaggtatagatgtggaagtttttatttagatttttggatttttttttttttattttgttatttattatttgtttgagttgtttgtatagttgtttttttgtttttggttgttgtttgttaagatgttttagagatattttattttggttttgtatttttatttttgtattttagttttttattaaagagtaggtaggtgtgatagtgttgtgtggtttttgtttagattaagtttatatttgtttttggttatatttatttatatatatttaaatttattattgttttttaatatgtgtttattttgaattatagatattaaaaaatagatattggttagaagagtattttgaggtgtttatttaaatgtgttttaagtttgtttttgagttttttgggtggttgtatttatatatttgtatgatgatgatttgtttgtattaaatttgtatatattatgaataggtgttttttattatatttaattatgtgtgattttaatagtttttatattttgtagaattgggttttagttttattgtgtttgagtgtttagtttagtagaggtagggattaaggtgtttgttgtttatagtgtttagagtggtaagaaagaagttttttagtgtttttattattttttggtggaatgtgtagtgtgtgatttgttgtagttggtttgggtgttgtttgtgtggtgagtgtagtagtggtattttggggttgtgggtggaggtaaggattttagtttgaggttttttgaggtagagtagaaattagtttttaggtgtgttgtttgtggtgtgagttatggaattttaggtattttggggttgtgtttgtatttttgtttttagtttttagaagtgttgaaattttttagtatgatatttttgttttgtgttatattttttttttttagggggttggtggtttttgtgtttaaaggaggtagtgggaatgtttaatttttaagatgtttttaattgatttttttttttttaattatagtgagggaataataatttggggttggggattgggtatttaagatttgttttttgtagggttgttggtagggtggttataggatttgggattggaattggtttgggaggatattggtgtgtgttagtgtagagtgtgaaataggtaatgtgtgtgtagagtagggtttggatggtggattttgggtataatgagttttggattttgaaggaagataatttttgttgagattttgtttggagttttggagttttttagtagtttaggtttggatttttggtttgggtttttggtgtagagttgtttgaagagttgtgaaggttgtagtgtgggtattgagtggggtgtagtgtttgggtttttgttattggggttgtagtagaagggtatttgtgtttagttattatatattttagtggaaatgatttttttttaagattagaggtttttaatataagaattttttgaaattgtttgtaagtgtgtgtgtttgtgatgtgtgtttttttaaagagagagtttatagtttttgtttgtgttatggtgattgtaaaatgaaagttagtagatgtagattttgtggttatgttattttgaggggttggaattttatttttgattgtggtgtgtgtttttagtttttagaatagatatgtattttttattattaaatttttggtagttataaattaaaggttggtgttgtggggtgttaattagagtttgtgtttagagggtgttagtgtagttttgagtagttttaagattgattgtaaaagtttgtttttttaggataggagggatggttattaatttattttttaagtattttttgagtttgtaggaattgtttggttttttgttgggggttgaaagttttttttgtttttgtttgaaaattattttttttagtaattagtattatgttaggtattttagtagatgatttgttaaagttaaatgaatgaaaatttattttggtaaatttattagttttataaggtagtttgtagaaaatttggatttagttagagtggtattttgttttgttttttgaaatttataaattatttagttagattttttttattttatttgttatagtaagttggtttttaggtagaagtttttaggaatgaggtagggaagtaaggattttgtttagggttttttttaaagattgagattttttggtgtaaaatgtgaagttattttttgagtttattttggatttattgagtgagtgaaggaagggtagagttttttgtgagtggattatttagattttattttgttatttttggaatttttttgagttttagtattaaatagagtatggtttaatggaagttgttaaggaaaatgttgattttaaaaaaatagttgtttgattatttgatttttgatttttattgttttattttttaatttaaaaatttggaaattagggttagttttgaaataatttgattttggaaaaaaatatttttataatattttaataaagtttaattgtaatgtttgtttttatttgtttagattagatttttgtattttttgtttaagaaataaaaataaatatgaagtttggttgaaaatttttatgtgaatttttatgtgattaaaaaagttatatttgaaggtttgagtttagagtttaagttaaatttattattgttttataatttttttataatatggatttaattataaaattttagtagtagtaatagtattattagtaatagtaatataatagtttataatatatatattttttttagtttggtagaaatgtggagttattaaattaattggaaaaaattttaattgaaaattgattgtattgtttaaagaagggtagaaattaaagttttttattattgtgtttattgaagaatatgttaagagaagtagttgtttttgaattatttttttaagatatttttagattgtagtaaagttgtttttggggaagggagtatagaaatggttgttaaagagatagtgagatttataataattaagatatagaaatagtttaagtgtttattgatgaatgaattattaaagaaaatgtggtgtgtgtttattatatatatataatggaatattagttagtagtattatttagaagaaggaaatattgttatttgtgttaatatggttgaatttggggaatattatgatatataaaataagtgaggtatagaaagatatgtaatatatgattttatttatatgtagaattttaaaaaataagttgaatttagtaataaaggttagaatggtgattatttggggttgtggttgggggtaaaagagaaatattagttaaaggatataattttttagttataagatgagtaagttttggagatttaatatatagtttggtgattatagttaatatatgtttgaaatttgtaaagagagtagattttaagagttttaagtgtatatatatatatatatatataggaaattatgtgaggtaatgatatgttaattaatttgattgttgtaattattttataaagtatatatgtattaaaatattatattgtatattttaaaaataaaaatttttaatatggaaataaaagtgaaaaaaaaaaagagtgagagatagttgaaattttttagtgggaattttgttgaagattttagaagaggggtatttgtataaatattgaagaggatattaatgttttattaataatttagatatagaattatttaaaagatgttgtatgtgtagtaagtatgaaaagttatataaattatattaaattgaaataaagaaaagatattataaatattataattattattaattaagttttatttgtgtgttaggtattgtgtgtatattattttttttatttttaatagtttaataagatagatatttttatttttgttgtatatgtaagggaatagtaagagtatttggtttgaattaattatattttttaggttttttttgaggatttgaaatatagtttatttttttgttatgttaggtaagaggtttggttttttggatttaggtattgatttagaggaagatatgggtatgtttgtttgttttagggtta

SEQ ID NO: 224 - DNA, 1630 bp, Artificial Sequence
  chemically treated genomic DNA (Homo sapiens)
gagtttgagttatgttatgtttgttgtatgtgttagtttgtgtagtatattagggtgttggtttttttttttttttttggagtgaaatatattaaagggtgtggtgggggtggggggtgatgggaggaaggaggtgaagaaatgttattagattgtattttttgtaaagatagttttgatttaaggatgtgttagagtatgtgttagggttgattgtgttggtggattttattgtagttggtttttagggagaaagtttggtagagtgaggtgtgaaattggagggttggtgaggatgtgggtgaaggattgagtgtggaggttttatgtttttggggaaaggaaggggtggtggtgtttgtgtagggggagtgagggggagttggatttaattttttatttgtttttttttttttttgggttattttttagaaagttgtattggtgtggttatgtttagtgtagatattttgggtggtttgttagtagatgtaggggtgaggaagtgggttttttttgtgtggttgttgggtgggggaattgttgggagttttgtttttggtttgtggtggttttagatgttgtattgtgttgttttatgggttttgaagagtttttagaaatatgatggtttttgtttgaggattatattttatttttttagagaagtatttttttttttttttaatatttattttttttttttttttttttttttgtatatattttgtaggggggggtagaagggatgttgttttggtttttttaattggggtttttgaaatagttttgaagttattaggaatatagattttagggatatgatttttatttttgggtatgtgaggttgttattttttaaaattatttttttttttattttttatttaagggatttatttttaaattgtttgaggttattttatttttagataatttattttatatttttggattttaaatataagggtaggaggattaggatttgttttgaagaagttaaagttggagggttgtattttggtgtgttatatttatagaatgagtgaaattagagggtagaaataggagttggtagttttttgtgggttgtttgtttggggtttttggtatgtaggttggatggagggagaggggtggggggtggtgggggattgtgtttgaagttgggttgggttagttgttgttttttttaataatgagaggggaaaaggagggagggagggagagattgaaaggaggaggggaggattgggaggggaggaaaggggaggaggaattagagtggggaggtgtggggagagggaggagagttaattgtttagttagtttgtgttattgttttagagtggagaagagtgagtaggggagagtgagattagttttaaggggaggattggtgtgagtgaggtagttttgaggttttgtttgtttattatttaatttttgttttttttttgttttattttttttttttgtttttattttttttttgaaaattttttatttagttaaaggaaggaggttaggggaatgtttttttttttttttttaaaaaataaaaatagaaaaatttttttttaggttggggaaagtaggagggagaggggttgttgggttggttatggag

SEQ ID NO: 225 - DNA, 1630 bp, Artificial Sequence
  chemically treated genomic DNA (Homo sapiens)
ttttatggttagtttggtggttttttttttttttgttttttttggtttggaaaagggtttttttgtttttgttttttggaaggggaggggagagtgtttttttgattttttttttttggttaaatagggggtttttgggggagaggtgagggtagagagagaaggtggagtagaagggaggtgaggattgggtggtgggtgagtagagttttggggttgttttatttgtattggttttttttttaaaattggttttgtttttttttgtttgtttttttttgttttgaagtggtgatgtaagttggttgggtagttagtttttttttttttttttgtgtttttttgttttggttttttttttttttttttttttttttggttttttttttttttttttaatttttttttttttttttttttttttttttttgttattaaggagaatagtagttggtttgatttaattttaaatgtggttttttgttattttttatttttttttttttatttagtttgtatgttaggggttttggataggtaatttataaaaaattattgatttttatttttgttttttaattttatttattttgtaggtgtagtatgttaaaatatgattttttaattttggtttttttaaaatggattttaatttttttgtttttgtatttaagatttaggaatgtagggtagattatttgaagatggggtgattttagataatttagaaataggttttttaagtgaaaaataagggagggggtgattttagaaaatagtaattttgtatatttagagataaaggttatgtttttgaagtttgtgtttttgataattttgaagttgttttgaaagttttgattaaagggattagaataatgttttttttgtttttttttgtagagtgtgtgtagaggaagaagagggagggagaggtgggtattaggaaggaaggggggtgtttttttggagggatagaatgtgatttttgagtagaaattattgtgtttttgggggttttttggggtttgtggggtgatgtggtgtagtgtttagggttgttgtaggttgggggtagggtttttagtggtttttttgtttagtggttatgtaggaaaaatttgtttttttgtttttgtatttgttgataagttgtttgaggtgtttgtgttgagtgtggttatattgatgtagttttttaggaaatggtttgggagggggagggggtgagtgagggattaggtttggtttttttttgttttttttgtgtaaatattattatttttttttttttttggaggtatgaggtttttatgtttggttttttgtttgtatttttgttgattttttggttttgtgttttattttgttaggttttttttttgggagttgattgtggtgaagtttgttagtatggttggttttgatatgtgttttaatgtatttttgagttaaggttgtttttataggagatatgatttggtggtgtttttttatttttttttttttgttattttttatttttattgtgttttttggtgtattttattttaggaggaaggggagagattagtgttttgatgtgttgtgtaagttggtatgtgtagtgggtatggtgtggtttgagttt

SEQ ID NO: 226 - DNA, 5976 bp, Artificial Sequence
  chemically treated genomic DNA (Homo sapiens)
agaggggtattttttattttaatttgaattttatgattgtattttttgttaggagatgaaagggataagattgtttgaaggattaatttttagtttttaggtaggttagtggttaaaatatttaggaagtgaaagtttgttttttgttataaggaaatttggagtttgtgattttattatgtggggtttgttatttgttaggtgatagggttttttatttatttgtggtgatttgaagggtaaggtttttggttaaatattttttttttttagtgatgtttgaaattttattgttagtgttggattttagtaagattttagagaaagtttaatttttggagtttgggttttttttagttgagatgttaggaaagtaatgggttttattatttgtatggataggtttgtgtatagttttaggggatttagggattttattagagtttatttatagatattaggttaaaagttttggatagtatttataatttttttgaaagaagaaaagtttttttttagagttttttttaaagtgtaaatggttttgggaggtttgaaatgatgagttggttggtatgaaagaattttttttagtagatgtaagagataatttgaggagttttagtggtgggggtgggggaaggagagtttgggggaggggaggttttaggtagtttataattttttttagaattggaaagggaatgtattgggttaagagggttaattatttatttttgtagagtgtttataagaattttatgaattaagtgttattaatatttttattttatagatgaggaaattaagatggtggagataaaatgatttatgttttttaattaatggtagagttagaagtgaatttaggttggagtgaagtggttttagtgtttaaatgatttttttattttagtttttagagtagttgggattataggtatgtattgttatgtttagttaatttaaaataatatttgttggggagatggggttttattatgttgtttagattggttttaaatttttgggtttaagtaatttttttattttttaattagttttttaaagtgttgtgattatagttgtgagttattaggtttgtttaggtatttttgtttgatataagagaaaatagagggtaggtatagtggtttatatttgtaattttagtattttgggaggttgaggtaggtggattatttgaggttaggagtttgagattagtttggttaatatggtgaaattttgtttttattaaaatataaaaattagttagatatggtgatgtgtgtttgtaattatagttatttaggaggttgaggtataagaattttttgaatttgggaggtagagagtgtagtgagttgagattgtgttattgtattttagttggggtaatagagtaagattttgttattaaataaataaataggaaatagagaagtaatttagtgtgttgtgaaagttatatagtatttgttttttataaggagtttttttgtgtttttgttttattttggatatttgatttattgtttttggagtttggagaaggatttgttgagaagtttgaagaatgtattaggtttgatttgattttgttgtttttaattgttttttaaaattttttttattgaattattagagtgtaatggaagagttgatgagagttgttgtagagttatgaggttaaggtttgttgggtagaagaaagtaaagttttaaaggtttttagggtttagtgatggtataaaatatgtatttttatataattgagaggaaaaaaataagtagatagtatagttttatgggggaaatgtttttttttgtatttttattattttgtttaaggtatgattttagtgggaaaggaaatattggagttttttttttttgagttttttggtgggttaagagtagagggagttaaaatatgatatttaaaagatttgattggaaatttattaaaattgaggggataggttgttggggggggtggtgttgggttgtttagaaattgtttgtatttgagaaattatttgatggatttagaggtatttttagttttgggtgaaatattttaaatatggttttttttaggaggaagtgaaataggggttgggttttttgaaagagtaatttttattttaaatatttattgagtagttgttatgatgagttaagaattttgtttagtgattgtttttgtattagtttatgttaatttatttatataaaggagaatattgatttttttaaggttatagggttagtgagtggttgattttatttaatgttgtgtagttttaattatgtttgaaggataaagggaaaggaggtgtttttgttggggtagataagttatttagatgtggttggttatagggagttagatagggaagttgtttaatttaatatttgtttgtttattttgtttttgttttttgatggaggatggtgggtgttggagggttattggtttaggatttgagatttttggtttttatttattttatttttgattttaaaattattttattggggatagaattttttggagaaggtgatggtggttatggtgtggttgtggtattaaaagttttattttgggggttagaagattttgggttttggtttttggttttgatattgatttgtttatgtgatattgaataagttatttgtaaattataggtttgggtgaattttaaaggttttttttaggttaatattaaaaaatagattgaaaattgtagttttagttggaagattgggattatatgagatgaagttgattgttagaagaaaggttttggaattagagaggttggttttagttttgtgttattttttattggttttaatttttttaagttttagttgtttatttattatatgggaataataatatagtttttgggttgttttgaaatgagtttaaatgagttggttagtggttgggtatggtggtttatgtttgtaattttagtattttgggaggttgaggtaggtggattatttgaggataggagtttaagattagtttggttaatatgatgaaattttgtttttattaaaaatataaaaattagttagttgtggtggtgtatgtttgtaattttagttatttaggaggttgatagaggagaattgtttgaatttaagaggtgaaggttgtagtgagttaagaatatattattgtattttagtttgggtgatagagtaggattttgttttaaaaaaaaaagagttggttagtgttaaatgtttagtatagagattggtatagtaatttttaatgtttagtatttattgttattattttttttttttttttttttttgagatagagttttgttttgttgtttaggttggagtatagtggtgtgattttggtttattgtaagttttattttttaggtttatgttatttttttgttttagttttttgagtagttgggattataggtgtttattattatgtttggttaattttttgtatttttagtagagatggggttttattgtgttagttaggatggttttaattttttgattttgtgatttgtttgttttggttttttaaagtgttgggattataggtgtgagttattatgtttggttttattgttattatttttattttttatttttgtatagagtatttatggtttaagaaatatttgttattttaattgtatgggagttttataatagtatagggagatatttttgattattatttttattaggagggtggagaaattgaggttttgggaggtggttttgatttagggaattaatttgttgatttattaatttatgaagttttatagttaaaaaagattagattaaaaaatgagaatttagtaaaggggttgaggtaggaggattgtttgagtttagaaatttgagattagttttggtaatatagtgagattttttttttagaaaaattttttaaaaaattaggttgtttgaggtagagtgtagtggtttatgtttgtaatttaatattttaggaggttgaagagggtggattatttgaggttaggagttttagattagtttggttaatatggtgaaattttgtttgtattaaaaatataaaattagttggtgtggtggtatatgtttgtagttttagttatttaataggttgagataggagagttttttgaatttggtaggtggaggttgtagtgagttgagattgtgttattgtattttagtttgggtaagatagagtgagattttgttttaaaaaatataaataaaataaataaataaaaaattaggttgttagtttagtggtttatggtttatatttgaaattttagtattttgggaggttaaggtaggaggattgttttagtttaggagtttgagattaggttgggtaatatagggagatatagtgtttttattgtttttgtttgttttgatttgtttttttataaaaaggtaaaagaaaaaaaaattagtttggtgtggtggtgtgtatttgtatttttagttattagagaggttggggttagaggattgtttgagtttaggagtttgaggttgtagtgagttgtgattgtattattgtattttagtttgggtgaaagagtgagattttatttttaaaatgaataaataaaaaattttaaaaaataaaagaatttagttaagtgtaaaagttttttttgattttaggttttagtgagttattggtggggttgggatttgaatttagtggaattagaattgtgtaggttttataatttatttagattttagtaattttaggttagagggttattgtgtttatgtgaggttgggtgggtgggttgttagttttgttttggggaggggtttgtgttgttgattggttgtggttggtaggtgaatttttagttaattagtggtatggggggtggtgtttttggggtttatttggttgtagttatgtatttttttttagtggtgttggaattgtaaagtatttgtgagtttgtggaagttagtttagattttagtttgttttagtttggtttgatttgattgtatttggtgtttgtttttgtttggtgtttttggttagttatgggtttttggagttgtagttttttggtgttgttgttgttgttgtaggtattttggattttttgatttgtgagggatgtatttgggttgtaagttttgtgttttagttttgtgttttttttttttttgttgttattgtttttttttttttaagaaagtttgggttttgaggagtggagtggtttggaagttttgtgtgttttggattttttagtgatgggagtggggggtgggtggtgaggggtgagtgtggtttttttgttttttttagtgtagattgaggtgggggtgtttggttgtggagtttgtggggtgggtttgtgtgggtggtgggggtgtgaagtggggtgtagggggtggggtgtggagaaggggtgttttggtgtaagttgagggggagttaggagttgtggggatgatttttgagggaaggagaggggtatttgtagaaataaaggtatttgttatgttaagaaaggttgtaaataggagtgagggttttggggataagaaagtgaggttggaggaggtgggagtgttttttgttttgaggagtggtgtatttttggtttaaggaaagtggggtattggagaataaagatatttttaataaaatgagaaaggagattgaaagggaatggtgggttaggttttgagggggtgatttggtggtttttttttgggagtttttgggggtttggtggttgtaggttttggggtgggggagggtgatgttgttgtttgtttgttttggggttgtgggttggggtttttttttaattttgatgttgggagtgagggaggggtggtgttgttggttttggtgagtaggagggaattttttgagttatttggttttatttattttttttttattttagg

SEQ ID NO: 227 - DNA, 5976 bp, Artificial Sequence
  chemically treated genomic DNA (Homo sapiens)
tttggggtgggggaaaggtagatggaattgggtgatttggagggtttttttttgtttattgaaattaatagtgttgttttttttttgtttttggtgttgggattgggggaggattttagtttgtagttttgggatgggtgggtagtgatgttatttttttttattttgaaatttatggttgttgagtttttaggaatttttgggagggggttgttgagttatttttttaagatttagtttattgtttttttttagtttttttttttattttattggagatgtttttattttttagtattttattttttttagattgggaatgtattattttttagagtgaggggtgtttttattttttttgattttatttttttatttttgggatttttatttttatttatgattttttttggtatggtaggtgtttttatttttatggatgttttttttttttttttgaagattgtttttatgatttttggtttttttttgatttgtattagggtattttttttttatattttattttttatattttgttttatgtttttattgtttgtgtgagtttattttgtggattttgtggttagatgtttttgttttggtttgtgttggagggggtaggaaagttgtgtttgttttttattatttattttttatttttattattggggggtttggagtgtgtgaggtttttaggttgttttgttttttaggatttgaatttttttggaagaagggaagtggtgatgatgggagaggaaggggtgtagggttggggtgtggagtttgtggtttgaatgtgttttttgtaagttaggggatttggggtatttgtagtagtagtagtagtgttgagaggttgtggttttaagggtttatggttggttggggatgttgagtgagggtaggtgttgggtgtggttgggttgggttgggttggagtgggttggagtttgaattgatttttgtaagtttataggtgttttgtagttttgatgttattgagagggggtgtgtggttgtagttaggtgagttttggaggtattgttttttgtattgttgattggttgagggtttatttgttggttatagttaattagtagtgtggatttttttttagggtggagttgatggtttgtttatttggttttgtatagatgtggtgattttttagtttggagttgttagggtttaggtgggttatgggatttgtatggttttgattttattgggtttgaattttagttttgttggtggtttattaagatttgggattagaaagggtttttatatttggttgagtttttttgttttttgggattttttgtttgtttgttttggagatggggttttatttttttatttaagttggagtgtagtggtgtgattatagtttattgtagttttgaatttttgggtttaagtggttttttggttttagtttttttagtagttgggagtataggtgtatattattatgttaggttaattttttttttttttgtttttttgtagagagataagttggggtggataggggtagtgggggtgttgtgtttttttgtattgtttagtttggttttgaatttttgggttgaagtgatttttttgttttggttttttaaagtgttaggattttaggtgtgagttatgagttattgagttagtagtttaattttttgtttgtttgttttgtttgtattttttgagatggagttttgttttgttttgtttaggttggagtgtagtggtatgattttggtttattgtaatttttgtttgttgggtttaagagatttttttgttttagtttattgagtagttgggattataggtgtgtgttattatattggttaattttgtatttttagtatagatggggttttattatgttggttaggttggtttggaatttttgattttaggtgatttattttttttagttttttgaagtgttggattataggtgtgagttattgtattttgttttgagtggtttaattttttaaaaaatttttttagagaggggattttattatgttgttgaggttgattttaaatttttgaatttaggtgatttttttgttttagtttttttattgagtttttattttttaatttagttttttttaattgtagagttttatgggttagtgagttagtaaattgattttttaggttaggattattttttaaagttttagtttttttatttttttaatgggaataatgattagaaatgtttttttatgttgttgtgggatttttatataattaaaatgataaatgttttttgagttataaatgttttgtatagaagtgaggggtaaaaatagtaataatagggttaggtatggtggtttatgtttgtaattttagtattttgggaggttgaggtgggtagattatgaggttaggagattgagattattttggttaatgtagtgaaattttgtttttattaaaaatataaaaaattagttaggtgtggtggtgggtgtttgtagttttagttatttgggaggttgaggtaggagaatggtatgaatttgggaggtggagtttgtagtgagttgagattgtgttattgtattttagtttgggtgatagagtaagattttgttttaaaaaaaaaaaaaaaaaaaaaatagtaataataggtgttggatattgaagattattgtgttagtttttgtgttaagtatttgatattgattagtttttttttttttgagatggagttttgttttgttgtttaggttggagtgtaatggtgtgtttttggtttattgtaatttttgttttttgggtttaagtggtttttttttattagttttttgagtagttgggattataggtatgtgttattatgattggttaatttttgtatttttagtagagatagggttttattatgttggttaggttggttttgaatttttgtttttagatgatttatttgttttagttttttaaagtgttgggattataggtatgagttattgtgtttagttattgattagtttatttaagtttattttaaaataatttaagagttgtattattatttttatatgatagatgggtaattgaagtttagagagattgaggttaatgagaggtggtgtaggattggaattaatttttttgattttagggttttttttttaataattagttttattttatgtggttttagttttttagttggagttgtagtttttagtttgttttttgatgttgatttggaagagatttttagagtttatttaaatttatgatttgtaaataatttgtttaatgttatataggtaggttaatgttaaagttaaagattaaaatttaggattttttgatttttagagtggggtttttaatgttatagttatattatggttattattattttttttagagaattttgtttttagtgaaataattttaggattaaaaatagaatagataggggttaaaggttttaggttttgggttagtggttttttagtatttgttgttttttattaaaagataaaaatagaatagataggtaaatgttaggttagataatttttttgtttgattttttgtggttagttatgtttgggtggtttgtttattttgataagggtattttttttttttttattttttaagtatggttagaattatatagtattaagtggagttagttatttattagttttgtgattttggggaagttagtgtttttttttgtataagtgaattggtatgagttaatataaaaataattgttaagtagagtttttggtttattatagtaattgtttaataaatatttggagtaggggttatttttttaaaaggtttagtttttattttgtttttttttggggaaagttatgtttggaatattttatttagagttaaaggtgtttttgagtttattaagtaattttttaaatgtagatgatttttgggtagtttagtattgttttttttaataatttgtttttttaattttaatgagtttttaattaggttttttggatgttgtattttggttttttttgtttttaatttattaggaggtttagagggagaaggttttggtatttttttttttattaggattgtgttttgaataagataatggaaatatagaaagaggtgttttttttatggggttgtattgtttgtttatttttttttttttagttatgtaaaaatatatattttatattattgttgggttttgggagtttttagggttttatttttttttatttagtaagttttggttttgtaattttgtagtgatttttattgatttttttattatattttgataatttaataaaaaggattttagaaaataattaggggtagtaaagttaggttaggtttgatgtattttttagattttttggtaagtttttttttaagttttaaagatagtagattaggtgtttagggtgaggtgggaatatagaggggttttttgtggaagataggtgttgtgtgatttttgtaatatattgaattgtttttttgttttttatttatttatttagtgataaggttttgttttgttgttttggttggagtgtaatggtgtgattttggtttattgtattttttgttttttaggtttaagagatttttgtgttttagttttttgagtagttgtgattatagatatatgttattatgtttggttaatttttgtattttagtagagatgggattttgttatgttggttaggttggttttaaatttttgattttaagtgatttatttattttagttttttaaagtgttgggattataggtgtgagttattgtgtttgttttttgtttttttttgtattaaatagggatatttaagtaggtttggtggtttataattgtaattgtagtattttgggaggttagttgggaggtgagaagattatttgagtttaggagtttgagattagtttgggtaatatggtgaaattttatttttttaataaatattattttgaattagttggatatggtagtgtatgtttgtagttttagttattttggaggttgaggtaggaggattatttgagtattggagttattttattttagtttggatttatttttggttttgttattagttgagaagtataagttattttatttttattattttggtttttttatttgtaaaatgggaatgttgatagtatttaatttataaggtttttgtaaatattttgtaaaggtgagtgattagtttttttggtttaatatattttttttttagttttaggaaaaattgtgagttgtttggagtttttttttttttaggtttttttttttttatttttgttattaaagttttttaggttattttttgtatttattggagaaaatttttttatgttggttagtttattattttgaattttttagggttatttgtattttaaagagggttttagagaaagatttttttttttttaaaggagttgtaaatgttgtttagggtttttaatttggtgtttgtggatgggttttggtggggtttttgaattttttgagattgtatataaatttgtttgtgtaggtgataaggtttattgtttttttaatattttaattggggaaaatttaaattttaggagttgagttttttttgagattttgttgagatttagtgttaatagtggaattttaggtattattggggaaaagaaatgtttggttagaggttttgttttttagattattgtagatagataagagattttgttatttggtagataatagattttgtatgatgggattatagattttaggtttttttatggtagaggatagatttttattttttgggtgttttggttattggtttgtttggaggttaaagattaattttttaggtagttttgttttttttattttttggtaaggggtgtagttatagggtttagattggggtgggaggtgttttttt

SEQ ID NO: 228 - DNA, 3486 bp, Artificial Sequence
  chemically treated genomic DNA (Homo sapiens)
aattaaagaggatgagattttttgtttgattttaggtgaatttttttttgttagttaggtaggaagttttgatttgaaaattagttttgggtattgttttttttattgttttttgggtattaatttttgttttttaattttagttgaattagtggatggtgatattataggtttaagatagttgtatttaaatattagtgattataggttatattaaggaaatatttgtaggtaatttagggtttgggaaggagttatttttagttatttgtaagatagtaggatttgtagattatagtataattaaatttagataaaattttgaattagtgagaattattaggaaggaaaggaatagaaaatgaattaatttgagtgttaggagatttgtatttagttttgattttggtattaattgaatgtatgtttttggataggaaatttttttgagttttgattttttttgtggtaaaaaggagagggttaaattatagggttttgagggttttttttagttgttatattttggagtgtatgagatgaggtaggtatataaagtggataagatgtggttaagaaaataagttatatattaagtttatttgtagtataggtgtttaagaaaattttgttgttgtgtaatattagaatggaaggttggtttttagtaaaatgtattaattttggtttaaattaagatgatgggtattgggtatgggggtggggaggtagttgaagatttattgagttttgttttagggtagttttgtttattgttttattttattttttattatggtgtttaagtttatattgagagagaaatttttagttgtaaaagggagaagagaaatgttggaatattagtattggatgttaggatatggttgtggtgttttaaaaattattttattatttggagtttgattttgaggggagtatttttattttttagttttttgaaagtatttattagtatttgaatattgttttgagtttgttggagtagtgaaatttggtgagagagaagggtggaggaaggaaggagttgttgtatttggtggttggatttaggtagaggaaattgttataattttgggaaagaatagaaaagtagaaagggatgagtttttatatgtagttaatgtttatggttttaattgtgtttgggaaggaagattttgggttaggggtgtatttttgttttttaaaattaaatgtgtttgagatagttataaagtttattaagggatttgagagattagagttttttgttttttttttttaattttgagttttttttttatttttattgagggagagtttgagtttatgataagtgttgtgtttatttttggttaatttttaaaagaaagatgtttgttttggttttttttttaggtttttagtttttttagggatggtagaaatttttgggttaaggttgagtgaattattgtttattgtttttattagtttttagtaaaggtatgttggtgggggggtgtttagtttttttagtaaatgttttgtggttttttttgtagattatgaggtgggggttgttggggagggttgagttgggggtagtttgttattttggtttttagtgagttgttggtgatttttgtggttttttggtttaggttttggttttttgggtgaggagtgggagggaggttggggtttaggtgttgtggtgaatttgttaatgtagtgttgggttttgaattttaggttttgttttaggtttttggttgtttggttagtttgtttgttttaattttaatttttttgaggttagttagagtaggtttgttggtagtagtatttttttagtagttatgtgattagttaattttttggtggtgtttggggaggtggtgtgtttgggaatgaggggaggtggtggaattgtgttggggttattttaaggttgtgtttgttagttttggtggggtggtttttgttgttgtaattaatggatttttttttttgtttaaatagatttgttgtgttaattatttttttttttgttagttttttttttattgttatattgggttattaaaaaaagggggtttgtttttttggggtgttttttttttttttttttgtttttgtttgtttatggttttgtgattttgatgttggtaaggtttggagagtggttgggtttgtgggatttgtgggtttgtatttgtttagatttggatgggttttgttattttttttgtttgtttggtttttttttttttttgtttttttgtttgttagtttatttgattagtggagatttggtggttgggttggggtttttttgtagtttttgtgtgtttttagagtttgggttgtggtttgttggggtttgtgttttttggttttgagggtagttgttgggtttttgagaggggtttgggttgtgtaggggtgttttgttttgtttggttttgtttttttgagagtgtgagagaggtggttgtgtagatttgggagaaagatgttaaatgtgtgagtgtttaatgggagttttagtttggagtggatggatgttaggtaggtggagtattttaagtttttggtttgtaggaatttttttggtttggtggattatgaagagttaatttgggatttggagaagtattgtagagatatggaagaggtgagttagtgtaagtggaattttgatttttagaattataaatttttagagggtaagtatgagtggtaagaggtggagaagggtagtttgtttgagttttattatagatttttgtggttttttaaaggtgtttgtaaggtgttggtgtaggagagttaggatgttagtgggagttgtttggtggtgtttttaattggggttttggttaattttgaggatatgtatttggtggatttaaagattgatttgttggatagttagatggggttagtggagtaatgtgtaggaataaggaagtgatttgtaattgatggtaatgatttttttttaattatagaatgtgtttggggttttgttttgtttgttggagggtgttaattttagtttgttttttggtgtattttgatttagttttgggagagttaattttattggttttaggtgtttagtgttatttggtttattgtttgtttgtttgtgatttttaagttagaaattggagatggtaagatttgataatttttttaatttaatatattgtggttttttttattagtaatttttaggtatgtgataaagttgggatgtttattaatggtttgttttttggttagggaaagagttttggggtggagaatgtattttttgttttttgaaaataattttattttgtgtttttaaaagttattggggatgatggatttaggattgtgggtggaggtagtgggttttttattttttgattatggggttaatttttgttagttattgttttttttaataaagattgtgtgttttttttaaaaattttttttgtgtttaga

SEQ ID NO: 229 - DNA, 3486 bp, Artificial Sequence
  chemically treated genomic DNA (Homo sapiens)
tttaagtgtaggggaaatttttaaaaagaatatataatttttattagaaaaaataatggttggtagaagttggttttatagttaggggatgaaaaatttattatttttatttataattttggatttgttatttttagtggtttttaagggtataaaatgaggttgtttttaaaaaatagaaagtgtattttttgttttagagttttttttttagttaggaggtggattgttgataaatattttaattttgttatatatttaggagttgttagtgagagggattgtgatgtattaagttagggaaattattggattttattatttttagtttttgatttaaaagttataaatagataagtagtgggttaggtagtattgaatatttaagattaataaagttagtttttttaaagttaaattagaatatgttgaaaagtaagttaaggttaatattttttagtaggtaaagtggggttttaaatatattttatggttgggaaagggttattattgttggttgtaggttgtttttttatttttgtgtattgttttgttaattttgtttggttgtttgatggattagtttttgggtttattaaatgtgtgtttttagagttagttggagttttaattaaaggtgttgttgggtggtttttgttgatattttggtttttttgtgttggtattttgtaggtatttttggggggttgtgggggtttgtagtagaatttgggtaagttgtttttttttattttttgttatttgtatttgttttttaggggtttgtgattttgaaaattgaaattttatttgtgttggtttgttttttttatgtttttgtagtgtttttttaagttttgggttaattttttgtggtttattgggttgaagaggtttttgtaggttgagggtttggggtgttttgtttgtttggtgtttatttgttttaggttagggtttttgttagatatttgtatgtttgatattttttttttgggtttgtatgattgttttttttgtatttttaaaaaaataaaattgaataaaataaagtgtttttatgtagtttgaattttttttggaagtttagtgattgtttttggagttaaaagatatagattttgatgagttatggtttgagttttaggagtgtgtaggggttgtggggaagttttggtttggttgttgagtttttgttgattaaatggattggtgagtgggagggtggagaggagaggggattaggtaagtggagagggtggtaaagtttgtttgagtttgggtgggtgtaagtttgtgggttttgtgaatttagttgttttttaaattttgttggtgttggagttgtagagttgtgagtaagtggggataggggagggggagaaaaatattttgaaaagatgagttttttttttttagtggtttaatatggtggtggaagggaggttgatgaagaagaaaatgattgatatggtgagtttatttaaatagaggaggagatttattggttgtggtggtgggagttgttttgttgaggttggtgagtgtggttttaaggtggttttggtgtggttttgttatttttttttgtttttgagtgtgttgtttttttgagtgttgttgggagattggttggttgtgtgattgttggaggggtattgttgttaataaatttgttttggttggttttggagaaattaaaattaagataaataaattagttaaatggttgggaatttggggtggggtttgaggtttggggtttggtgttgtgttggtgggtttgttgtggtgtttaagttttgattttttttttgttttttgtttgggaagttgggatttggattagaggattgtgaaggttgttggtagtttgttaggagttggggtggtgagttgtttttagtttggttttttttagtggtttttattttgtggtttgtgggggaggttgtggagtgtttgttgggggggttgggtgtttttttgttggtgtgtttttgttgggggttggtggaggtagtgggtaatggtttgtttagttttaatttagaagtttttgttatttttggggaggttgggggtttagggaagaagttaaagtgaatgttttttttttagaaattagttaggagtagatgtggtatttattatgaatttaagtttttttttaatgaaaataagaaaggaatttaagattaaaaaaaaaaaataaaaaattttagttttttaagttttttaataaattttgtagttgttttagatatgtttagttttgaaaaatgagggtatatttttggtttaggatttttttttttaagtatagttaaggttatggatattggttgtgtgtgggaatttgtttttttttatttttttgtttttttttgggattgtagtagttttttttatttgagtttagttgttaaatataatagtttttttttttttttattttttttttttattagattttattgttttaataaatttagaataatatttagatgttagtgaatgtttttagagggttgaagggtgaaaatattttttttggggttaaattttagatgatgaaatgatttttaaaatattataattatgttttaatgtttgatattagtattttagtgtttttttttttttttttgtagttggaaattttttttttagtgtgggtttgagtattgtggtggaaggtaaagtaggatgatgagtagggttgttttgagataaagtttagtggatttttaattgtttttttatttttatgtttggtatttattattttggtttgagttaaagttaatgtattttattggaaattaattttttgttttaatattatatagtagtaaagtttttttaagtatttatgttatagatgagtttgatgtgtagtttgtttttttagttatattttgtttattttgtgtgtttattttattttatatgttttagaatgtgatagttggaagggatttttgggattttgtggtttaatttttttttttttattatggaggaaattgagatttagagaggttttttgtttagggatatgtatttggttggtattggagttaggattagatgtaagttttttaatatttaggttggtttattttttgttttttttttttttaatggtttttattggtttagggttttgtttgagtttgattgtgttgtagtttgtaggttttgttgttttataagtgattgaaaatggtttttttttaggttttgggttgtttgtagatgtttttttgatgtggtttgtggttattgatatttaaatgtagttgttttgagtttgtggtattattatttattagtttaattaaaattgaaggataggggttgatatttagagaatagtaaagggggtagtgtttagaattagtttttaagttaggattttttatttaattgatagaaaagaatttatttaggattaagtaagaggttttattttttttagtt

SEQ ID NO: 230 - DNA, 8666 bp, Artificial Sequence
  chemically treated genomic DNA (Homo sapiens)
ttgtagggttttttttagtttaaagaaagtaattaggtgtttttattgtgttatgatttttatttttagttgggttttttagtttggttttaaagaataaaataaaaggtttttttgtttgagttttatttaatttattttttttatttataagaggtattttaaatttttatgatttttaaattttttaattgattattttatttttattttgtaaataagttaatttttttatttatagaaggaagtgttttaattttttttttgttttgatttttttttttttttaaatttatgtattttttgtgataaaatttataattattgttgtattttgagttttatttttttattatttttgagggattttaagtttttaaaaatattttattttgtttgtgtatttaattttttttttatttttttttaatttttttttttttttatttggtatttgtttttttaggtatatgtgtgtttaggttttttttattttttatttgttttattttatggtatagggttttgaattattataattaagttatgaaagagtagttaatgtagtgtttttatttttttgttattttattattttagttttttttttggttttttgaggagttttttataggttggtttttaggaataagtttaaatgaattatttttagtttttttaaatttttatgtttttgtatatttttttatttttgtttagaatattttttttttttttttttatttttaaatttttatattattttttaagattgggattagtttttagtatttggaagtttttgtttattagagataaatgagaatgagtttggttatttttttatttttttgtattattttgtgttttattttgtttttttaagagtattatatgttttatttaatttttaaataattgtttgaggtaagtatagttattattttaattatgtaaatgagaaaatagaggtttagatatgttgagtaattttgataaaagttaaagaattaataagtggaatagttgaggtttgaattttggtagtttgattgtagagatattatgtttgatttatttttttttgtttttattttatgtttgtttttagtttttgagtttgttgaatgaatgaataggtggtagtttttttttgttataagattgattagaattaagataggtttaaattttatgtgtagaatttttaaaattgtaaaggtagtgtaaatttaaaaaaagaatggtatttttaggaaagaggaaaagtaagtgtgagaataataataataataattaataaattttagtaaatttagtaaatgtagtaaatttttatattaaaagtttttggatatatattattatattttatggttatatgaaatatattataattttattttgtatataggaaatttgagattggtataaggagtatagagatttaggattttatatttttatttttttaggattttgtattttaggttgatatgtatgagtaaattgggagtataatgggttttttaatagaaaaattaggaaagtttttttattattattaattatttatataatatttttttaattttattattatttatattttaagttttagagtatatgtgtataatgtgtaggtttgttatatatgtatatatgtgttatgttggtgtgttgtatttattaatttattatttagtattaggtatattttttaatgttatttttttttttttttttttatataagatttataatggataatggattttaatttttagagtaaaatggttttatttaaggatgttataatttttttagagttttattgtaagatatgagatatatatatttaaaatttgtttttggtatttttaaagtagttaatttttatatttgtttataatgtatttaaatgttgtttttatatggttgtattttttattttttttattaatagttatatatattttttataagagttgaaagagtttttgatgtaggaatttatggtagagttttagagaaatttttgaatttattgaaagttttatttagaaatatatgtgtaagtgaatatattttttttaaaaaaaattattatttatttttttttttgagaagaaggtatttattttaatagatttttgaaggagtttattttttttatttttttatttttattaagaattattgtaggttgggtatgatggtttatgtttgtaattttagtattttgggaggttaaggtgggtggattatttgaggttaggagtttgagataagtttagttaatatagtgaaattttgtttttattaataatataaaaattagttgggtatggtagtatgtgtttgtaattttagttatttgggaggttgaggtaggagaattgtttgaatttgggaggtggaggttgtagtgaattgagagagattgtgtggtgttattttattttagtttgggtaatagagtgaaattttattttaaaaaaatatataaaataaataaataaaaagaaagaattattgtattagtgatggaaatgtgtttttttttttttattttggtaattatttttttttttttttattataaaatattttaaattaaattaaaataattttatttattgatagtttgaattttttttattattgttatatagttaattgagaggtattttgaggaaaatataaatggtatagtaatgtattgtagattttaataatatatttgatattttaaattgtttttattggttttattttaaaaattatatgttttaaaattaagtagatattaaaagtataagatatattgggtttataaggtttaagttaattagggattgaaatataatttttaaatagagttggattatttagtaggtagattaagtatgtgtttaaggtattagtaaagtttgagtaatttattttttaaaatgtagtatatgtttttgataagtttaaaaagtagtagttataggaaaaattagaatttttatttttttgtgtttgttatattttttagtgttgtttaatttttttttgtaagtgagggtggtggagggtgtttataatttttttagggagtaagttttttttggttttttttttttttttttttttttttttttttgagattaagttttgtttttgttttttaggttggagtgtaatggtgtgattttggtttattgtaatttttgtttttttttgggtttaagtgatttttttatattagtttttgagtagttgggattataggtatgtgttattaagttttgttaattttgtattttttagtagagatagggttttgttatgttggttaggtttgttttgaatttttggttttaggtgatttgtttgttttggttttttagaatgttgggattatagatgtgagttattgtatttggattttttttttatgtaatagtgataattttatttaaagtatttttttttttttttgagttggagttttattttgttatttaggttggagggtggtggtgtgattttggtttattgtaatttttgttttttgggtttaagtgatttttttgttttagttttttgagtagttggaattatatatgtgtgttattatggttagttaatttttgtatttttagtagagatggggtgttattattttggttaagttggttttgaatttttgattttaggtgatttgtttgttttggttttttaaagtgttgggattataggtgtgagttattgtgttttgttttaaagtattttttttttatgttttaaaataagattgtaagttagtttttaaagtggataatttaagagttaataggtattagtttaggatgtgtggtattgtttttaaggtttatatgtattaatatattatttaaatttataataatttttataaagtagggggtatttatatttttttttttttttataattatgaaaaatgtaaggtatttttagtaggaaagagaaatgtgagaagtgtgaaggagataggatagtatttgaagttggtttttggattattgtgtaattttgtttttagaatattgagtattttttttggtttaggaattatgattttgagaatggagtttgtttttttaatgattttttttttatttttttatttgtttataggtagaatttttttttgtttgtattaaataaattttatttttttagagtttgtttttatattaggtaatgtatatgtttgagaaatttttgttttagatagttgttttatatgtaggaggggaaggggaggggaaggagagagtagtttgattttttaaaaggaattttttgaattagggtttttgatttagtgaattttgtgtttttgaaaattaagggttgagggggtagggggatattttttagttgtataggtgattttgatttttggtggggtttttataattaggaaagaatagttttgtttttttttatgattaaaagaagaagttatattttttttatgatattaaatattttgatttaatttggtagttaggaaggttgtattgtggaggaaggaaatggggtgggggtggatttttttttaatagagtgaatgtatttaaatatgtttttgttggtaggtgggggagtgtggttgggagtagggaggttggagggtggtgtggggggtaggtggggaggagtttagttttttttttttgttaatgttggttttggtgagggttgtttttggttggtgtttttgggggagatttaatttggggtgattttaggggtgttatatttgttaagtgtttggagttaatagtattttttttgagtatttgtttatggtgtttttttgtttggaaagatattgtggtttttttagaggatttgagggatagggttggagggggtttttttgttagtattggaggaagaaagaggaggggttggttggttattagagggtggggtggattgtgtgtgtttggtggttgtggagagggggagagtaggtagtgggtggtggggagtagtatggagttggtggtggggagtagtatggagtttttggttgattggttggttatggttgtggtttggggttgggtagaggaggtgtgggtgttgttggaggtgggggtgttgtttaatgtattgaatagttatggttggaggttgatttaggtgggtagagggtttgtagtgggagtaggggatggtgggtgattttggaggatgaagtttgtaggggaattggaattaggtagtgttttgattttttggaaaaaggggaggttttttggggagtttttagaaggggtttgtaattatagatttttttttggtgatgttttgggggtttgggaagttaaggaagaggaatgaggagttatgtgtgtatagattttttgaatgttgagaagatttgaaggggggaatatatttgtattagatggaagtatgttttttattagatataaaatttatgaatgtttgggataaaaagggagttttaaagaaatgtaagatgtgttgggattatttagtttttaatttatagatatttggatggagtttattttttttattaggagggattattagtggaaatttgtggtgtatgttggaataaatattgaatataaattttgattgaaattatttagaagtggttgggtgtggtgttttatgttttgtaatttttttattttgggagattaaggtggggggaattatttgaggttgggagtttgagattagtttggttaataggtgaaattttgtttttattaaaaatataaaaagtagttgggggtggtggtaggtgtttgtaattttagttatttgggaggttgaggtaggagaattgtttgaatttgggaggttgaggttgtagtgaatagtgagatggagttattttattttagtttgggtgatagagtgagattttgttgaaagaaagaaagagagaaagagagagagaaaaattatttagaagtaattatatattgtgtttatttttaattgagtagggtaaataaatatatgtttgttgtaggaatttaggaaataatgagttatatttatgtgattattttagaggtaatatgtagttattattttgggaatatttgttaatatttttgtttttttattatttttagtttatttgatatagtttatttgtgataagagtttttaattttttatttttgaatagaggtgttttttttttttttatttttgttttgtgagggagttaggggaggatttaaaagtaattaatatatgggtaatttagtatttttaaaattttgttaatagtttgaatttgggagtttggttttgtagttttataatattttagaagagattttatttgtttaaaaataaaaaggaaaaagaaaagtggatagttttgataatttttaatggagaagggagaagaatatgtagaaaaggggaaatgatgttggtttagaattttaattatattggtgtttaatataggaatatttatttatataatattttaaagtattaaatttatattagtatattattaaatggatatattattaaatgggtttaagtattttatatattttaatttaattgatttattttttttttgttttggatttttattatgatttaaatatttatatatgggttattttttagattttttatattatgaaatataagaaaaatttttaaggttagttttatgattaagatgaaggattttattgaatatataaaataataaatatattgtaatattttgtttttttttttgtagttgtaatttggtttgtttatattttttttttgtttttttgaaaattgagttagttttatttttttaggataggatttaataattataatataatttagtataattttttgatttaggtaaattatgtaatttgtgtttagtatgaaatgtatttaaaaataagtaatttttttttaatattattatttttaaattaatataataaataatagttattttaaaataaattgtttatttttattatgtagtatttaaattttaaggttgttatgattgtagatagtattttaaaatttttttttggaaatggttttgtttttaagatgatttaggaattaaagaggtgattattttttgtttaatgaatttttaaattataaatttgggaagtgttttagttttttattgttgttgttataaattattataaatgtgttagttaaaataaatataaaattattattttatagttttagagattagaagttaaaaatgggtttataaggttttattttttttggaaattttaaggggtaatttgtttttttgttttttttagtttttagtgattattaaattttttggtttatggtttttgtattttttttgtggtttgtgtttttatttttgtattttttttttgattgtgattttttaataaaaatatttggggttatgttgggtttattttgaaaattttggataattttttttaagattattaattaaattatatttgtaaagttttttttgttatataagttaatgtattaaaagtttttgaggattaggatatagatattgggggtgggggggtattatttagtttattataggaaggaattttagggttaattaaattagtttttttattttatatttgaagaaattgaagttttggaattggagagtattatgttaaatgaaataagttaaatatagaaagataaatattatatgtttttatttatttgtgaaatataaaataattatatttttagtagtaaagagtagaatggtggttattagagttggggggtgggaggaatggggagatggtaattaagatataaagttttagttaagatgggaggaataagtttgattgttttttttgagatgtgttttatagtatgatgaatatagttaaatagtaaattttaaatgtttttatttgataaaaatgttaaatatttgagatgatggataggttatttagtttgatttaataattttttattgtgtttaaagattataattttatattgtattatataaatatatataattgtattattttaatatataattttaaaattaatataatgaaaaagaaattgaagtttaatatttttagaagttaagtgtaatttaaaagttttgtgagaatttgttttaataaataaataagttttttttttttaataattattatattttgtgtttggatatatagtagtgaataaaaaaaaaaaaaaaaaaaaaaatttttaggtttaatataattttaggaagaaattttagtagttgtattttaggggaaatataggaagttagtttggagtaaaagttagtttgtttttgtttttttgttattttgtttgtgttttatagtgttttttgtttgtgatgatagttttgtagaagtttggaggatataatggaatttattgtgtattgaagaatggatagagaatttaagaaggaaattggaaattggaagtaaatgtaggggtaattagatatttggggtttgtgtgggggtttgtttggtggtgagggggttttatataagttttttttttgttatgttggtttttattttggttttgattattttgttttttttggtagg

SEQ ID NO: 231 - DNA, 8666 bp, Artificial Sequence
  chemically treated genomic DNA (Homo sapiens)
tttgttagagagaatagaatggttagagttagggtgggggttggtatgatggaaaggaagtttgtgtagagtttttttattgttaagtagatttttatataagttttaggtgtttaattatttttatatttgtttttagtttttaattttttttttgagttttttatttattttttagtatataatgaattttattatattttttgaatttttgtggagttgttgttataggtagagagtattgtgaggtatgggtaaaatagtaaaggggtagggatagattgatttttattttaggttaattttttgtattttttttgagatataattattgaaatttttttttgaaattatgttaggtttggagatttttttttttttttttttttttgtttattgttgtatatttaagtgtagaatgtggtaattgttaaaaagagaaaatttgtttgtttgttaaaataaatttttataaaatttttaagttatatttagtttttgggaatgttgaattttaattttttttttattatattagttttaaaattatatattgggatagtatagttgtatatatttatgtggtataatatgaagttatgatttttgaatataatggggaattattaagttaagttaagtaatttatttattattttaaatatttgatatttttgttaaatgagagtatttgggatttattatttagttatatttattatgttatgaaatatattttaaaaaaaataattaaatttattttttttattttaattgaggttttatattttgattattatttttttattttttttattttttagttttagtaattattattttattttttattgttaagaatgtaattgttttatattttatagataagtgagaatatgtgatatttgtttttttgtgtttggtttattttatttagtataatgttttttaattttaaaattttaatttttttaagtataaaataagaaggttagtttaattaattttaaaatttttttttgtggtaggttgaataatgtttttttatttttaatgtttatgttttaatttttaaaaatttttaatatattaatttatgtggtaaaagaggttttgtagatgtgatttaattaatggttttgagggagattatttagaatttttagggtgggtttaatataattttaagtgtttttattagagggttatagttagagagaagatataagaatggaagtataggttatagagaaaatatagagattatgagttaaggaatttgatggttattagaagttggaaaagataaggaaatagattgttttttagagtttttaaaaggaatgaaattttgtggatttatttttgatttttgatttttagaattgtaaaataataattttgtgtttgttttagttaatatatttgtgataatttgtaatagtagtagtaggaaattaaaatattttttaggtttatgatttgagagtttattaaataagagatggttatttttttggtttttaaattattttggaaataaagttatttttagagaggaattttaaaatattgtttgtagttatagtaattttaaaatttgagtgttgtatggtggaagtagataatttattttaggataattgttatttgttatattagtttgaggatggtggtgttaaagaggagttatttatttttaggtatattttatattaaatataaattgtataatttgtttaaattaaggaattatattaaattatattatggttattaaattttgttttgagaaagtgaaattgatttagtttttaaagagataaagagaaagtataagtaaattaaattgtagttataaaaagaaagataaaatgttgtagtatatttattgttttgtgtatttaatgaagttttttgttttggttataaaattagttttaaaggttttttttatattttatagtatgaaaaatttaaaaagtaatttatatgtaaatatttaaattatgatagaaatttaaagtaaaaagaaaatgaattaattgaattaaaatgtgtaggatgtttaaatttatttgataatatatttatttgataatatattaatatgaatttagtattttaaaatgttatataaataaatgtttttatattaaatattaatgtagttaggattttaagttaatattatttttttttttttatatgttttttttttttttttattaaaaattgttaaaattatttattttttttttttttttttgtttttaaataaataaggttttttttaagatattgtaggattataaagttaaatttttgggtttaagttgttggtaaaattttagagatgttaagttatttatgtattaattatttttaaatttttttttaatttttttataaaataggagtagggagaggagaaatatttttgtttaaaaatgaggaattgaaaatttttattataaataaattatattaagtaagttaaagatagtaaaagagtaaaaatgttagtagatatttttaaaatggtaattatatattatttttggaatgattatatgaatgtggtttattattttttaagtttttatagtaaatatatatttatttgttttatttagttaaaaataaatataatatgtagttgtttttgaataattttttttttttttttttttttttttttttttttgataaagttttattttgttatttaggttggagtgaagtggttttattttgttgtttattataattttagttttttgggtttaagtgatttttttgttttaattttttgagtagttgggattataggtgtttgttattatttttggttattttttgtatttttagtagaggtgaggttttatttgttggttaggttggttttgaatttttgattttaggtgattttttttgttttgattttttaaagtgaagggattataaggtgtgaggtattgtgtttggttgtttttgaataattttgattaaaatttatatttgatatttattttaatatatattatagatttttattgataattttttttagtaagaaagataagttttatttaggtatttgtgaattggaggttaagtagttttagtatattttatatttttttaagattttttttttattttaaatgtttgtaaattttgtatttgataaagagtatatttttatttaatataaatatgtttttttttttagatttttttagtatttgagagatttgtatgtgtgtggttttttattttttttttttggttttttaagtttttagggtgttgttaggaggaggtttgtgattataaattttttttgaaaattttttaggaagttttttttttttttggagaattgaagtgttatttgattttaatttttttgtaaattttgttttttagagttgtttgttattttttgtttttgttgtagattttttatttatttggattggtttttgattgtaattatttggtgtgttgggtagtgtttttgtttttagtagtgtttgtattttttttatttgattttgggttgtggttgtggttagttagttagttgaaggttttatgttgttttttgttgttggttttatgttgttttttgttgtttgttgtttgttttttttttttttgtagttgttgagtgtatgtggtttgttttattttttggtgattagttagttttttttttttttttttttggtgttggtggaagagttttttttgattttgttttttaaattttttggagggattgtggtatttttttaggtaaggggatgttgtgagtgagtgtttggaggaggtgttattaattttgagtatttagtgaatgtggtatttttgaagttgttttaggttgggttttttttgggggtattagttggaagtagtttttgttagagttagtgttggtaaggaaggaggattgggtttttttttatttgttttttatattgttttttggtttttttgtttttagttgtgtttttttgtttgttagtaaaggtgtgtttgagtgtgtttattttgttaaaaagaaatttgtttttgttttgttttttttttttgtgatataatttttttaattgttaaattgaattggggtgtttggtgttatagggaaagtatggtttttttttttaattataagaaaaagtaaaattatttttttttagttgtgagagttttattgagaattgaaattatttgtatgattagaaagtgtttttttatttttttaatttttgatttttaggagtgtggggtttattaagttagaaattttagtttaaaggattttttttggagagttggattgtttttttttttttttttttttttttttttgtgtgtaaaatggttgtttggggtaagggttttttagatgtgtatattgtttggtataagagtagattttgaaaagatgaggtttatttaatatggatgggggagaattttgtttgtaggtagataggaaaatggggagggagttattggaaggatggattttatttttaaagttataatttttagattagaaaaagtgtttagtgttttagaagtagagttgtatagtgatttaaagattagttttaaatattgttttgttttttttatattttttatattttttttttttattgaaaatattttgtattttttgtaattataaagggggaagggaatatgagtgttttttgttttataggggttgttgtgagtttaaatgatgtattaatatatataagttttaagaatagtgttatatattttaagttaatatttgttagtttttgaattatttgttttgaggattggtttgtaattttgttttgaggtatagaaagaaaatgttttggagtaggatgtggtggtttatatttgtaattttagtattttgggaagttgaggtgggtagattatttgaggttaggagtttgaggttagtttggttaaaatggtgatattttgtttttattaaaaatataaaaattagttggttatggtggtgtatgtgtgtaattttagttatttaggaggttgaggtaggagaattgtttgaatttgggaggtagaggttgtagtaagttgagattgtgttattattttttagtttgggtgatagaatgagattttgatttaaaaaaaaaaaaaaatgttttggatagaattattattattatataaaaggaaagtttggatgtggtggtttatgtttataattttagtattttgggaggttgagataggtggattatttgaggttaggagtttgagataagtttgattaatatggtgaaattttgtttttattaaaaaatataaaattagtggggtttggtggtgtatgtttgtaattttagttatttggaggttgatgtaggagaattgtttgaatttaggagaaggtggaggttgtagtgagttgagattgtgttattgtattttagtttgggagataagagtgaaatttggttttaagaaaaaaagaaagaaagaaagaaagaaagattaagaagaatttattttttgaaaagattatgggtattttttattatttttatttataaagaaaagttaaatagtattaaagagtataataagtgtaaggaggtaaaagttttaattttttttgtgattattattttttaagtttattaaaaatatgtattatgttttaaaaaatggattgtttagattttgttgatgttttaagtatatgtttaatttgtttattggataatttagttttgtttaaaagttatattttaatttttggttgatttaaattttgtagatttagtatattttgtatttttagtgtttgtttgattttaaaatatgtagtttttaaaatgaagttaatgaaaataatttgggatgttaagtatgttattaaaatttataatgtattattgtattatttatattttttttggggtattttttaattagttgtgtagtaatgatagggaaaatttaaattattgataaataaaattattttagtttagtttaagatattttatgatggaggaggaagaaagtggttgttaggatgggagggagggaatatatttttattattaatataatggttttttttttttgtttgtttgttttgtgtgtttttttgagatggagttttgttttgttgtttaggttggagtgaaatggtattgtatgattttttttggtttattgtaatttttgttttttgggtttgagtaatttttttgttttagttttttgagtagttgggattataggtatatgttgttatatttagttaatttttgtattattagtagagatggggttttattatgttggttaggtttgttttgaatttttgattttaggtgatttatttattttagttttttaaagtgttgggattataggtatgagttattgtgtttggtttatagtggtttttaatgggggtgggagagtgggaagagtaggtttttttaagagtttgttgaaataaatattttttttttaaaaaagaaagtaggtaatgattttttttaaaaaagatgtgtttatttgtatatgtatttttagataaaatttttagtgaatttagggatttttttgaaattttattatggatttttatattaagaatttttttagtttttgtgaaaaatatatatagttattggtgaagaagatgggagatgtaattatataaaaataatatttggatgtattataaataggtgtaaaagttgattgttttggaaatattaagaataagttttagatatgtatattttatattttgtagtagagttttggaaggattatggtatttttgggtggggttattttgttttagaaattgaagtttattatttattataaattttatgtaggggggaggggggagggatagtattaggagatatatttaatgttaaatgatgagttgatgggtgtagtatattaatatggtatatgtatatatatgtaataaatttgtatattgtgtatatgtattttaaaatttaaagtataaataataataaaattaaaaaaatattatgtaaataattaataatagtgggaaaatttttttagtttttttgttaaagagtttattatatttttagtttatttatatatattgatttgaggtgtaaaattttagaagaatgaaaatataaagttttggatttttgtgttttttatgttagttttagattttttatgtgtaaaatgggattataatatattttatgtggttataaaatatgataatgtatgtttaaaagtttttaatgtaaaaatttattatatttattaaatttattaaagtttgttggttattgttattattatttttatatttatttttttttttttttgagaatgttattttttttttagatttgtattgtttttgtagttttgaaaattttatatgtgaaatttaaatttgttttaattttgattagttttataataaaaaaagattattatttgtttatttatttaataagtttagaaattaagggtagatatggggtgggggtagaggggagtaggttaaatatagtatttttatagttagattgttagggtttaaattttaattgttttatttattggttttttaatttttattaaagttatttaatatgtttgggtttttgtttttttatttgtatgattaggataataattgtatttgttttaaatagttgtttagggattaaatgaagtatgtaatgtttttagaagagtaaaataaagtatagaatgatataagaaaatgaaaaggtgattaaatttatttttatttgtttttagtaggtaaaggtttttggatgttgagagttgattttagttttgaagaatgatgtgagagtttaaagatggaaaagaaggagaaagatattttaggtagaggtaagaggatgtgtaaaggtatagaagtttaggaaaattgaaagtaatttatttagatttatttttgaaaattagtttgtgaaggattttttagagagttaaaagaaaaattaggataatgggatggtaaggaagtggggatattgtgttgattatttttttatagtttggttgtgatagtttaaggttttatgttatgaagtgaggtagatggaaggtggaggagatttgagtatatatatatttggaagggtaagtgttaagtgaagagaagggaaagttagaaaagaataaaagaaaagttaagtatataggtaagataggatatttttgaggatttgaggttttttaaaaataatgaagaaatagaatttaaagtatagtggtggttatagattttgttataagagatatatagatttgggagggagaaaaggttagaatggggaggaagttgaggtatttttttttatgaatgaggaggttagtttgtttgtagagtgaaaataagatggttggttaggaagtttgagaattgtaaaggtttggaatattttttatgagtagagaggatgggttgagtaagatttagatagagaagttttttgttttgttttttaaaattagattggagaatttagttgagggtggagattatgatatagtagggatatttgattattttttttaaattaaagaaagttttgtag

SEQ ID NO: 232 - DNA, 2501 bp, Artificial Sequence
  chemically treated genomic DNA (Homo sapiens)
gaaaattaggttgagtaggttggttttttaaagaaatttattgagtttttataatgttttttttatttgatgggagaaaaggggttttggaagattaagtgtgaagttttagaattttgtttggagttggttaggattatttaggtttgagtataagtaaagtgttgtttgtggtgttagtaagtgtgaatgtttttggtaatgttttttttatttaaagttgttttttatttagttaatttgttttgtgaagtttatatatttgttttgtgtaagatttttagttattttatttagttattggttttttttttattattattttttatgttttttttaaagaaaaatattattttttatttttttattaattttaaatagtttttatttttttgatatatttattatttaagaaaatggtttaagaattgggttagattattttgttttaatttttttgataagttttagagaaatttaaaggttaaaataagagtataagagtaaaaggtagagaaattaagaaattgaagattaggaaatgggggttggatgggaaagaaaaagaaattgttattaatgttatttggtttttttttttgtttaggtggattttagttttgttgaggttttgttagtagatttttagttttaattagtatttttatggtggtggtatttttattgtttttaaaagaaagagttttttttaattttatagggatttgggggatgaggagttagagttaaggtattttaaaaaaaatatgtgaagatttttattttgtaatatataagtaattgtttttttgttaagattttgttttttttagtattttgaattaaaatgattttgtaaataaaaattgtttatttttaggagaggtttatttatgtagttttttattaaagtttttaggtaataaatttataatttgtggttttttttttatttaatgtagtatttgttgaaatgttttaaatattttaagtaataaatgttgatttaaatttatttaggaagattaggaaggggaaaaaaagtatttggtatttaaatttttagaagagaatttaatgataggtttagtttgtttaatgataagtttagtattatattttttttttatgatgttttattattattgtataaattttttttattatttatgataaataaaaataagatatttgataaagtgggtttaaataggtaagagtgtaaataaagatttattgtataaatatgatgaaattgggattttagatttttaaagtataatttttttttgttttatgtgtgttaggttgttatttttaattttgaattagttttttttttttttaagggttgtatttataatgtaaaaatggaaagaattaaaaagtatatgtaaaatatgatttttgggatttttttttatttttatggttgattaatttaaatagaaagatatatttaagagaaaattgttaagtttgatataagttatgaaatttgtgaagtttaagtattgtttggggatgaatttaatttgtatgataggtgtagagttgttgtttttagatattttaagaaatatggagttattttgaatgatttttttttggttataagggagttattaatgtttttatagtgaaattaattggttggttgaaggaatagaaattttttgttttgtttattggggattaggagttgagggtagtggtgaatatttttaaaatattagttttggttttattggatatttagtgagtagtgtagttagtatttttggtggttttttggtttagtttttggtgtatgtgttttagtatttttgggtaggtttttttgtttttgtgatgtgttggtttgggtttggttttttggtgattatagtggatagggggtggagtttaagggggtggggagatgttggttttttggtttagttgaaaatggaattttttgttggttggttttttattttgttagagtgaggtggggtagtgaggattttgtgatgtgtttgtattttgtggttagagtggttttgagtttggttgtgtttgtgttaggtgtttttttttagaagtaatttaggtgtgtttgttggtttttgagtgttaggaaaagtttggagttaatgattggttgtttggttattgtatggggttttaagttgtagaaggatgatgggagggtaatgaagttgagtttaggttttttaggaaggagagagtgtgttggagtagtgtgggaaagaagggaagagtgttgttaagtttatggttaatggtggattatttgggttgttgtgtgtttgggggttgtggaatgtgtgaggagaataagggtatgtttagtgggggtggtagtgatgagggtttggttagtgttgtggtgtggggattagtggagaaggtgtgatagtttttggaagttggtgtggattttaatggagttaattgttttgggaggtgtgtgatttaggtagttggggttttagggt

SEQ ID NO: 233 - DNA, 2501 bp, Artificial Sequence
  chemically treated genomic DNA (Homo sapiens)
gttttggggttttagttatttggattgtgtgttttttgaaatggttgattttgttgggatttgtgttggtttttaggagttgttgtattttttttattagtttttgtgttgtggtgttggttagatttttattgttgttgtttttattgggtatgtttttgttttttttgtgtattttgtagtttttagatgtgtagtggtttggataatttattgttggttgtaaatttaatgatatttttttttttttttttatgttgttttggtgtatttttttttttttaggagatttgggtttagttttattatttttttgttgtttttttgtggtttggggttttgtgtagtggttgagtggttggttgttagttttgggttttttttggtgtttaagaattagtgggtgtgtttggattgtttttgggaaaaagtgtttagtgtggatgtagttgagtttaaagttgttttggttgtagggtgtggatgtgttgtggagtttttattgttttgttttgttttggtagagtggggagttagttggtaaagaattttgtttttagttgggttaaggggttggtgtttttttatttttttaggttttgttttttgtttgttgtgattgttgggaggttaggtttgggttgatgtgttatgagggtggggaagtttgtttaaagatgttaggatgtatgtgttagagattgggttagggagttgttaggaatgttggttgtattgtttgttggatgtttagtaaagttaaggttaatattttgggaatgtttattattgtttttagtttttaatttttagtaggtggagtagaggatttttgtttttttagttagttagttggttttattgtggagatgttggtggtttttttgtgattgagagaaagttatttaaaataattttgtgttttttaagatgtttgaaagtgatagttttgtatttgttatataagttaaatttatttttaggtagtatttgggttttataagttttataatttgtattaaatttagtaatttttttttggatgtgtttttttgtttgaattagttaattataaaaatagagaaaaattttgagaattatgttttgtgtgtgttttttaattttttttatttttgtattatggatataatttttaaaagagaaaaaaattagtttgagattgagagtggtaatttggtatatataagataaaaaaaaattatattttaagaatttgagattttagttttattatatttgtatagtaaatttttgtttgtatttttatttatttaaatttattttgttaggtattttatttttatttattatgagtaataaaggaaatttatgtagtaataatgaaatattataagagaggggtgtggtgttgggtttgttattaaataggttgaatttgttattaaatttttttttgaagatttaaatgttaagtgtttttttttttttttttaatttttttaggtgagtttgaattaatatttattatttaaaatatttaaaatattttagtggatgttatattggataggaagagaattgtaagttatggatttgttgtttaaaaattttggtgaggaattgtataagtggattttttttaaaagtgaatagtttttgtttatagaattattttggtttggagtgttgaggaagataaagttttaataggagggtaattgtttgtgtattgtaaaatgagagtttttatatgttttttttaggatattttagttttgattttttattttttaaatttttgtagaattaaaaaaagtttttttttttaaaggtagtggaagtgttattattatggaagtgttggttagggttgaaaatttattgatagagttttaatagagttgaaatttatttggatagggaagggaattgggtagtattaataataattttttttttttttttatttaatttttattttttagtttttagttttttaatttttttattttttatttttatgtttttgttttgatttttgagtttttttgaaatttattagaaaagttaggataagatagtttgatttaatttttgagttatttttttaggtagtaaatatgttagaaaaatgaaagttgtttggagttgataaggaaatggaagataatgtttttttttgagggggatataaagaatggtgatagggaaagaattaatgattaagtaaaatgattgagaattttgtatgaggtagatgtgtgagttttgtgaagtaagttgattgaatgaaaaataattttgggtagggaaaatgttgttgggggtatttgtgtttattagtattatggatagtgttttgtttatatttaggtttgggtggttttaattagttttagatagaattttaaagttttatatttgattttttaaagtttttttttttttgttaaatagaaaggatattatggaagtttaatgaatttttttgaaaaattaatttgtttaatttggttttt

SEQ ID NO: 234 - DNA, 2501 bp, Artificial Sequence
  chemically treated genomic DNA (Homo sapiens)
gtgttttagtttttgaatttatgttgtttgttattatattgtattgtttgtggatgatttatttgtttttgtagttttatttgaagaatttttttttttttttttttgaggtttgttttaaatattattttttttgtgaagattgtttggtgttttttaggagagagtgtgatttttttttttaggaatggtagtattttaaatatatatattttgtagtatattttattttgtatggtaatggtttgtttgtgagttttattttgtattagagggtgagggttttgaagatagtgttaggttttatttattttgatattttataatatttattatatgtttgatgaatgaatgtatagggggatggttgggtgtattttttttaattttttaattttttgaaataaataataaaattttatttttttttagaagttttggtatggttttttttattttgttatagttattgataattatttttattttttgtgtaatttattaggtaagaagtttatgtagatttatttttagtagtttatatgataaataaatattgtgtttgatttttaaatattaaattatagtatattatagatagatatagagttattatttaaagtatgatattttaattttaaaaggttttttttgaagaatattataaattttttttttttttaagatttgttgggtaggaaagatgggagaaaatgaattaatgtttatatagaaaggaggataatgggggtaaaaataatagatgaatgtatgggtggatgagagaatggataaaatgataggtggatatgttgattttggatagatgggaaatgagtggatatattaataaatagatatgtgggtggatgggtggagaagaggatggtggatggttgtggttttatgaagagatgtgaaaaaggaagtgtggaatgatggatgagaagttgtatgggaagatgaatagaagaataggtggttgaataaattaaaaggtgtgtggttggatgaatgaatgagtgggatgatagatggatttaagtggttagtggatggataggaggatggatggatgtgagagttttagaaggatataaggaaagatgggtggatagatggatgggtggatggaaggatatttaggaggatgaatgagtatgtgtgtggagagaggtgtttatttatattggtttgaatatatgggttagttgagttaaatgttagttttatgataggttattagtagttttttttgagttgttttgttaagaagttaaaatttatttaagttatgtggatttgttattgaggggaaaaagaatgagttttttttttttttatttggaagatttattaattttttattttttattttttattgtgggtatggaggtattgtgttatttagggtaagattttgttttttttttagttttttttttaggatatttaatattttgtgaaatttagagattttgttttagttggatttagagaaatttagtgggaaaggagaggttaaaggttgaatttaatggtgtaaggttttatggtttggttattttttgttttgatgttgtggggttagtgggagaagaaagttagtgtgtttttgggtgtaggggttagtggggtttggaggtataggtattttgtgatattttaggttttttgatttatgtttttggtagttttgattatttatagttttagtagagtatggggtgggggtagaggggtttgtttgggagggttgttattttttaaaatttttgtgggttgtttagttatagttttttttgtttgggtgtgttttttgtttgttttttttttttgttttaggttattgtttttaattttgaataaaaattgtagttaatttttgaggtagttttattgtttagtggattttagtttttgttaggtttggtttgttatttttgttttgttttttgttggtttttgttttgtgtttagggattttttagttttttttgtttgtgttttttgtttgttttggatattatggataagttttggtggtatgtagtttggggattttgttttgtgttgttgagtttggtgtagattggtgagtgtttgttgtagtttgggtagtaagatgggtgtggggtgtttagtgtggatttggtggtagtttttttggttgagttggttttgggggattggagttaagtgagttgtttgtgaagtgtattgggttttggaaagtagggttgggatttgtgttaaattgttggagaatgtgtttgtggaagtattatttggttgaaagaaaaagagaaagagaagaaagtttgttgggtaggttgttggtgtgtagttttgggtgaggttgttagagttgtagtatatggtagaaagtaattgtttttttggatgtgtatagttgttgtttggattaataggtttttgtgtttaagggtttgttaagttttattgggttgtgtttaggtagggtagagttgggtggggta

SEQ ID NO: 235 - DNA, 2501 bp, Artificial Sequence
  chemically treated genomic DNA (Homo sapiens)
tgttttgtttagttttgttttgtttagatatagtttggtggggtttggtgagtttttgggtataggagtttgttagtttagataatgattgtgtgtatttgggagaatggttattttttgttatgtgttgtagttttagtgattttgtttaaaattgtgtgttggtagtttgtttaataaattttttttttttttttttttttttttaattaaatggtgtttttatagatatattttttaatggtttagtgtaaattttagttttgttttttggagtttaatgtattttgtagatagtttatttgattttagttttttagggttgatttagttggaggggttgttgttgggtttgtgttgagtattttgtatttattttgttgtttaggttgtggtgggtatttattgatttgtgttaggtttagtggtatgaggtagagtttttaggttgtgtgttattaaaatttgtttatggtgtttggagtgaatggagggtgtgggtgaaaggagttggaggatttttgggtgtggggtaggggttggtggaggatgggatgaggatggtggattgaatttggtagaggttggggtttgttgggtaatgaggttgttttggaagttggttgtagtttttatttgaggttgaaaatagtgatttaagatggagggagggagtgagtgaaggatatatttaagtaaggggggttgtgattaagtagtttgtagaggttttaagaagtagtagtttttttgggtgggtttttttgtttttgttttgtgttttgttgaggttgtaaataattggggttgttagggatgtgggttggggaatttggagtgttgtggggtgtttgtgtttttgagttttattggtttttgtgtttagagatgtattggttttttttttttgttggttttgtggtgttaggatagaggatgattgaattgtaaaattttgtattattgggtttagtttttggtttttttttttttgttaaatttttttgaatttggttggagtaagatttttgggttttataggatgttggatattttgggagaggagttggagagagggtgaggttttgttttgggtggtgtagtgtttttgtgtttatagtggggagtgaggggtggggagttggtgaattttttaagtggaaagagggagagtttattttttttttttttaataataagtttatatggtttgaatgaattttagttttttggtagaatagtttagggaaagttattgatggtttgttatagggttggtatttggtttagttaatttatgtgtttaagttagtgtgaatgggtatttttttttatatatatgtttatttatttttttaaatatttttttatttgtttatttatttatttatttatttttttttatgtttttttggggtttttatatttatttatttttttgtttatttattaattatttaggtttatttattattttatttatttatttatttaattatatattttttaatttatttaattatttatttttttatttatttttttatataattttttatttattattttatatttttttttttatatttttttataaaattataattatttattatttttttttttatttatttatttatatatttgtttattgatatatttatttattttttatttgtttaagattaatatatttatttattattttatttatttttttatttatttatatgtttatttattatttttgtttttattatttttttttttgtgtaaatattaatttatttttttttattttttttatttagtagattttaaagagaggaagagtttgtaatattttttaggggaagttttttgagattgaaatattatattttgaatgataattttatatttatttataatatattatggtttaatgtttggaaattaaatgtagtatttatttgttatgtgaattattaaaagtaaatttgtatggattttttgtttggtgagttatatagaaaatgaaagtgattattagtggttgtggtaagatgaaaggaattatgttaggatttttgagggaaggtaagattttgttatttattttaagaaattgaaaagttgagagaaatgtatttagttatttttttatgtatttatttattagatatgtaatgagtgttgtggggtattgaggtaaataagatttggtgttatttttagagtttttattttttggtatggaataaaatttataagtaggttattattatgtaaggtgaaatatgttgtaaaatgtgtgtgtttggggtgttattatttttagagaagggagttatatttttttttggagaatattaggtagtttttataggggaagtgatatttgaggtaggttttaaaggaaaaggaggaggaattttttagatgaaattatagggataagtaagttatttataggtagtatagtgtagtgatgaatagtatggatttaggagttagaatat

SEQ ID NO: 236 - DNA, 16579 bp, Artificial Sequence
  chemically treated genomic DNA (Homo sapiens)
tgttttttaaaatgatgtttagttgaattagttaatggagataaaaatatttatatataatttttttttaagtttattagttattttatagattagttataattttggttattttaatgagttaatttttttttagagatattataaattttttaaagatggaaaataattgttatttttttgaataatgtttattatttaaaataatgtatataaaagttgtttaataaatttttgttgaattgagagaaaatataaaaaattgaaagtagtttgtttgtaataagtgtttgttaagttttatagatttttttttttttttggaattattgtaataaatatttgatttttgatttgtaggattaaaatgtgattttttatattttaataggagtaagtattagttttgtaattttttttgttaatagaataaaaatggaatgtatgtttgttgtttttatatgttggttgatatttatgttgaatattttttttataatgtagaggtttttttgttttttgttttgtgttttatttttgtttattatagagatattaatgatgttatgtgtttttttgtattattagtgtagtagtttttattatgttttttgttttggttttattgtagtttaattaaataaatggaaatgggtagttattgaaaataaatagtaattgtaaaagttttgttttttaagaaattttttgtattgtattttgttttgttttattgattttaagatttttattgtttttttgtgtttagaaattagattttttagtttgttttgttttagttagataaatgttttataaaaatgatttatattttttagattgtggggagagaagaaaaagattttgagaaagtgattaaggagggagtaagagtgatataatttttgatttaatttagttggattgtgttttttatgtttttatttttttttttataaaaaagatagtgtttttgatgttttgttttaggtagttttttagggtgagtgtagatgtgttgagttatttggttgttttgaggattggtttagagagtttttttttttattaatgaagttatttttttttggtagtttggttttttttattattttatgttggaatttggttttggtttgtatagttttgttgtgatgtagatggttttttagttaagttttagagaaatttgtttaattatgaataggatatttatagtataggagaaaaaaaaatttattaaaataaatattttattgtaatattttgatttgggggttggagagtaaaaatttaatatttgatgtttgggaaaaatttaatgttttatggttttttaaggaaatttgtttgtgtttaatttattagagtaatttatatattttgggttaaagtataatgagattgttattattattttgttttttgtaagattttttttttaagaataaaaagaaggtaataaagattttatatttttgttttttttagaaagttaaagagaatttaaagtgttggatgaaatgtttgtttttaatttgtagtgttttatttaaaaaaaaaattatgatataattttagaggataggttttttttttttagggtttttgaaagttaaaagtatatttttaatttgtagtattattgtattatttagtgaggataatttgtttagttgtgtttaggattagttagattaaggagttgaaattaagttttttttgaatttgaatgggattggaattttgttatttttagagtagtaatagatgatgttatgtttaagaatattttatttgattaataaaaaaggagaagtttgaaatgtaattttaaagaattttagaaggaggtttagatgaagataataaaattttttggagatatatttgttatttatattttttttttttaagttattggtttgttgtttttgagtttagttaaatttttaaagataagattaaagtaaggaagtaaggtatatagtttttggtttatggttttttttagatataagtattgtgaatgaagattttgttttatttatatttgggattttggagtttttataaagaatatttttagtataaggatgtgatttaaagggggatttatagaataatattttaattattgtttgatttatatttgagtgtaatggataaataaatataattttagttataaaatttgaaaaatatatatttttttatttaaaaatttttgatagttttgttaggtattggagaattagaaataaatgtttttttatttttttttttttgatgaaggaaagttattaaaaatagttatatagaaataataatataattgtagattttattttaaatatagttggtatgttttttttttttttttttatttattttttattttagatagttagaggggaaagtttgttttagagatagaaagaagatatttatggggtataattttattttagttatttgatagtttgaagaagtatttaattttttgaataataatgttataagttaaagaagagaaaagataggtagtttaaagttttttaatattgtgtatattttaattttttaagttagttttgagaaagtgtttttgttttgtagaagtatttggttaagtgttgtgaagtttattggtattaaaagaaattaaaaattttggaggattagagaattaaatttggtaatataaatgaaaatattttagaatgtaaaaagtatttaatttattatttttaattatgttttattatatatagatggtattatttatagtgaatgttaattattaatatttttttaaaaatgggtattaatttgttattagttgtttgtttttgatttagtttttttttgttgaaaggttttatttaattgtattataaagggataaaagggtaaaagataataagttttttagattggtagatttgttatttataaaatggttttgggtaggttatttgaattttttgaaatttaattagatttatttaaatttaagaatgagaatataaatttatattttgaagtgttttatagaaaggtttattttaatgtttggagtatatattttaatgaatatttattttattttatttttttttatttttgaattaagtaattttgaatttaaagttgttatgattagtattgaaaagattattggattattaattgtgtgattttgggatagtaattttttgtattttagtttgtttatatgttatatatgaaggttgaagtttgattttgttttgtgattattattttaaatatttgatgaaattaaattttagtgtttggaatggtagtataataaatttattaagaataaataatttattgtaaaaatatattgatttttaaatgatgtaattgatagttatattattgtagagggttgataaataataaaagaaatgaaagatgtatatggtgagaattgaaattattttgataagttttttatttgtttattatttaaaattaatgattatgttgaatgtttataaattataaaatataaaagaaattttataaatgtgtatgtataggagtttaagttattaaaagttttaaagtataagtttaaattaaattaattaaagaagttgagaggaaaaattggtttttatttttaattattattgttttgaggttttatgtttaatataattttttaagtagaggttttagagagaagagttgtgaggatatttttatatttgtgtagaaggaaaagtttgttatttattttagtatttttagtgttatattgatgtgtattttggatttattttgtttttattgtataaatttatatttgattttaaagaaaaggaaaatttaaagttttttttttttaaggggatagaaattttttgtgttaattgtttgatttttttttttgtaaggttttattggaaattttttgtaatataatgtaggggatttttttatgtgttgatgttgtttatatagtggggtgggtttgattgaagaaaaaaaattgtatatatgtatgaaagattatggttttatttttggaaagtatgaaaggtgattgatatttttaagaagtttttgttatttaggaaaattattaaatattttatttagagatatttggaaagattgaaggaaaggaagaatgaagaaagtagaatttagatttatgtggggagagatttgtggtagaggaaaagtattttttttgaatttgataagggatttgtttgggggaattttttgtttagttttttattattagggttttttgaagttgggttttttattgggtagttttttgggagtgtagtggggaatttttatattttttttttaggtttttgaaggattttgtttttttagtgttttttttaggttggtaggagttttgagtttgatatttttttttgatgggataggtaagttttgtgggtgtgtaaatatgttgtaattaagttttttgttgattttatagttttgtgtgtttttgagaagaagtgattgtatttaattgtttattgttggtttgttttttaagagtttgggggttttttttttttaatttagaattagttgtatggggggtggggaagtgggggtggggaaggagtgggagggtagtggtttttgtgagtagagtgatgttattgagtgagtttttgaatggggagtgttgttgtttttaagttgattggtattttttgttaggaagaaatgttaagaggtgggagtgtttggggagggaggtaggtggtttttattgtaggtgtggggagttgtttttttgtttttttgtttgttttttaagtttggatttttaggagtggttgaagttgtggagtgtttttggagtttgtgaatgaatttttttttttttttttttttttttttttgttgagttttttttttggttttgatggtatagtgatataatgatgatgggtgttataatttgtatttgaatttgtaggtgagttgttttgagtttttttggggaagaattttaggtgtgtggatgtaatagttgagaatattaggtgttgtggataggagttgggattaagatttttggttagttttgtatttttttgtattttttagtattgttttgtattttttgtatttttttttgggttattatgttttttatgtgatttgtttgggtaatgttgaatttagttgtgtagtgttgtagtgaattttttttttaaattgtaataagttgttttttaaggtaattatgttttttttgttttttttttaaaaaataaaaataaaaaatttatagaaaaaaatttgtgagtttagaaaaaagaagtaattggtagaaggttttaattaaggtaaagagttgtaaggtgaagttaagaaaatgtaggtatttaaaaaatgtaggtaatttttataaaggtttttggggagaggtatatagagggattttggtgttgaaaaagatttagataaaagaaatttagggtggggtgggggtaaaatgattaatggaattgggggaagggagggaataaattgtaaagaaattatagaaaagtggtgggtttttgagttggagagaagagagggatttttggtattttgatttttttgttgttgttgtttttaatatgtttgaggtaaaagtttgaatggggattattaagatttgttatagataagtttttgaagttgttttggtgtaggttatttggttttttagtttttggtgtgtggttagtgtttggtgtttttggaaagttatttttgggtagtttttgatagtgtgatttggtgtttaagtagtttgggattttgtgtggatttgatttttttagattgtaggtagtttgggaggaggtttggttgggggaggtgtaggatttttgttgtgtttttttgatgatttggggattgttatggtttttttttggtgtttttgggtttttttgttttgtatgtggtgtgaaggggttagtagggaaggagtagaggatggggggtggggttgttggagttttgtggaggtttgggaggtttttgggtgggaaaagtttgttttgaattggtagggatgtgtaataattttttttattttgaagagtgaaatagggtttgttgtttttattttaataagtaaattggtatttagagtgtattgtagataaaggtggtttggggatttgaattaggggtttttgggttagtttttttgtttagattataggagttttttgtttttttatatattttttatttttttttagttttttgttttagttgagtaattttattggtaggtttagtggtagtggtgtgtgtgtgtgttgggagttttgggggatgtttttggttggagtgttttattgttttgtagaggtgtgggtgttgtagggtgatatttttggtgtgtgtagatttagggtatttgggttgttttggtttgtggtttgtgttattgggtgtggagtggtttgggtgttaggtagaggagagtggggtagaaaaatagtgttatagtttaaattatttgttttttaatttaattgtgttttggtaagttttgtatgtttttgggagatgttgtgggaagggggagaaatttatatggtgtttggagagttgttttgttgtgtgtatatttgtggtagagtttttttgggttgtgttttttatttttgtgtttttttttgtttttattttttttgttttttttttttttttttagtttttgttttttttttttagtttttgtgtttttttttttatagttgataaatgaatggttagtgtgaaatttttgttttttttgtgttttaaggtagtagggagggaggagtgagggaggtggtgtgtttttttggatttgtttttagtttagtttataagatttgtagaatttagatgtttaggaattgggagttttgtggtgggtgtgggtgttttttgatggagaagttttgtataggtggagaaaaataagttttttagattaagtgtgtattttttataattttgtgtttaaggatggaaggttttagtttttttttaagttatttattttgtattttataatttgtggtgtatatttaggagtttggaggattttgaaaaaaggttttggtttgtgtaaagtgtagagatgtttttttgtgagttggttggaatgtatgtggtgttttgggtttagtttgttgtttagtggatgaatgtatatggttggggtggagttaggttttggaggtttagatgtgttattttgggtgtttttaagaaagataatatatatattgtgtttttaaaatttatgattatttgaatttaatggtagggttttgttttaggatattgtaaaagaagggtttttaatttaaaatttaaatttttttaattttagggtgggtgttggatgggaaagtggagagaaggtgggtagtgggaggaaaaaagaaagggaaggaagggaagtggaaggaaagaggattgtggaggggaggaaaaggagaaaggaatggagatggggtagatggtatttaaatagttaggaatggattggaagggtttgttttggggtttgggtttgaattttgagatttgttttaggatattttttttttttttttagtggtaataaatgtgattgtagaggtgtgttgggatggaagggtgggaaagaattagataagtggaggtggtttagttttgtttaaaggggttgggtttggggtttgtttttatttgtttattttgtgttaagggaggatttgtaatgggtgttttttgtagtggttgggttagttagttgttatgtgggttggtgttttggtttttagttgagatgggtgtgattttttgggtttagagattgtagtatagttgtataggtggttggtgtagttgaggtttttatttattgaggttaatgggggtggggtggggaaggtagggtttagtttaattgagagagttgagtggttttgtttttgggatttggggttggttgtttttggagttgatttgagttttatttagatagtgttgaatatttttattaaaaggttatttaagttttattttattttattttatttttgtttgttttttgggagtggtaggaggggtattgtgtttttgttttgaggtaggggagaggttaaaatttattttaagtaaattttttgttagaaaaatgagattttatattgtattttatttgttgattttttaaatatatttaggttattttaaagtttatttttagttaattaatagattaattttgttttagattgttataaagagtttgtttggaatggtaaatattgttatttgataagattaatagaattttatgggggtaaatatggaagggttgtgagtgtaattgaggtttttgtgttttaatgaggaattttagtggggatttggtggggattggaagtttagtatttatttagggagtgattgagttggaaatttggagaagtttggtgtagatgagatggtgttttttagagttgtattttaagtttttttattttgttgtatattggaagaattggattttaaagattttttttattattttagattttgtagttaatagttatgtttttttttttttgtttgttgaaagttgtgatttaattgttttaagtattttttgataattttgttaaatttattttgaaaatatttatataaagttttaaaataggatgttgtgagtgtaatataaaaataggaaggtattaatggaagtaataattagtgttttgagatagaagtggtttttagtttgtaatttggaaatgttaagagtagtatattagggagaaggtttttaagagtttgattttttgttttgagttttgagtaaagaaagaaatatgttagaattgtattgtttgtttgtagtaatattgtaaagggttttaatggattttaatgtgattgagtaattattttttttagtattaagtttatagtttttaatttttttgtgagaagattaggtaggaagtgggatgagatttaagataattatttaggatttatgttagaatttaaagttttgatttttttggtagataaaaatagagttggttttaaattgtattttttgtttttaaaaaaatgaggtttgaaaggaatttttttagatttatataggtttatagatgtaagttttttttttttttttgtgtttgtaaattggagggagatgtttttgatattttagaatatttgtatttatatatttgtaaattttgttaggaaaggatttaaatagttaaattaaaggtgattatgattaatgttaaagatattatttattgtttttttttttgttgtattattaggtttaaatattttggagttaatgattggttatttaattgagtaatagagtttttgagagtgtaaagattaattaattttgttttttaaagtttggtaattaagttttttttttttggtgagatttaaatatttttgttgatgttatttatggataaatattggtaaatattgtatttaaaatgggatattgttttgtgatggagtagaattttttaagatatatggtttttttgaaagaaagaattaatgattgtagtaaggtatttttttattatttatgtagagaaattagttaggattgataaatatttattgttgggagttatttgttttggtttgagaaaatatgttgattgttatataggtttgtattttattagaaaatataaagtatgtattttttttgatttggaattagaaaagggggattagatatggatgttttggttaagttttattttaattagtgaatttttgttagtttttttttgtagtttagatttggtaaattatatatatataaagtttgtgtgtgtgtgtggggtgtgtgtgtgtgtgtatgtatatagggtttttaaatattgttaagtttttattattgaatgtgttagaggtggttgtattttagaggttagtataaagaatttttgtttaatgtgttagttttgttttttgaaatatatttttgggtagatttattaattataaaaggatataaatgtatatattttttatatttgtatatattttattttatttttttaaggattttaagaggtgtttatgtttataaaatgagattatatattttataataaatatatttgataaattataatttttttattattaaattattgatttgatattatttgaggtatagtggaatgagtattagatttggaattagaaagtttgagttggatttattagttgagaaaattaagtaaagatattatttttggatttttagtgttataatttattaaatgaatatgtagttataaagattaaaagagtaagtattttgaaaaattatataaaaaagggatgataatatattatgttttgggatttatattgatttaattttataattttaataataattgtattatttaagttatgtagtttttattgaatttataaaataaattagagaggggtatattgttttaaaaattgtttagttttattaattagaagatagattatagaaattgattttaatgaagttggatatttagtggaaaggaagaattatttaataaatggttttaggataattgatgggtttatgtaaaataagaattagtttttatttgattttttattttaaaagaaatataagatgaattaaatatgaaatgtagggaataattttttataaaatgataaaagaaaattatgggattaaaaaaaataagttaggaatagagaaatttgttttaagtaaaatataaaatttagtgttattttaggaaatattgataggtttgattaagtaaaaattatataaaagtaaataatatatttggaaaatatttatgatatttgagagataaaaagttaataatttttgatattttatggatttttatgaataattttgaaaagtttatatttattaaaatatgagtaaaaattatgtataggtagtggtagaaagagatatagagttttaaaattatagaaaaaattgtttagttttatttgtaattaaataaatagtaattaaaatattaatgatatgttatattatttttttattaattagaggagtaataaaaaaaaataatttttttttttttttttttttttgagatggagtttgttatttaggttggagtgtagtggtatgattttagtttattgtaatttttgttttttaggtttaagtaatttttttgtgttagtttttttagtagttgggattatgggtatttattattatgtttggttaatttttgtgtttttagtagagtggggttttattatgttggttatggtagttgattttgaatttttgattttaagtgatttatttattttagttttttaaagtgttgggattataggtatgagttattgtgtttggtaaaaatgaaattaaaaagtttgatgtaagtttgtgttggttaggttgtggagaaattgggttttttatatattgttgtatgaaagtaaataggtttttttattttaaaaaataatttggtaattatttttttttgattttttattaaaagtttttaaaagatgtatatattttttgatttagtaattttattttttgatattattatatggatggatattggtattaatattatttaagataaatggataaggatgttttttgtagtattgtttttaagagtaaatatttggaaatagtgtaataggtttattatagggaattatttaaataaaagttgttgtatttatttaatggaaaattatgtagttgttaaaaataatatggaaaaattgtatttgttgatttggaatattttttaaaatatattgtattttaagtgaaaaaattgatagataaaattgagtatatattatatatttaattatgtaaaatgggtgtatatttatttttttaataaatatttattgagtgttttaggtattgtggatataggagtgaataaaatattaaagattgttttgttggaatttttattatggtaggtagagaaaggtaatttttaattatatatgtaaaatggtgatatgtgttaggatgaaaatagagtatgggaaagggaatagagtatagtatgttttaggtagagtaatgagaaaggagtttattaggtagagaatagaggagtgttaaggggtgataatgtgaaaaagtttagttaagtttaggtttaggaatttatatgatgttattatttgtatgaagtaaatttatgaaattttgtatttaaattatgtgatttttttttgttgtataatgattttttttgtgagaaagaattagtgagtaatatgatatgtgatgtttattatatttattttgtagttgaagtattttagaaagttggttgtttagggtatttaattagtagaatggtggataaaattattgtgtttttgtttttaagttattttttgttagttgagtttttttaaaattaagggagaatattaaatatttatttaatagaattttggtttttttttggaggttgtttatttttggtgtgttttttattttttttgtagatattttttatggataggagttttattgattttgttttttatgttttttaggtaattaaatagttttagtattttgtatttggattgtttaatgatttttttttttttttattgattttattggagtagaaggttaaatataggtatttatttttatattttttaggtttttttatgtagatagagttgttattattagtagatggtgtttataagagagatatggaaaagtggaagaatggaaatagggatttggagtggtgttaaaaataaagaaagaggtttttgaaagttttttatttaatatgattaaatatagaagataaaagatgtaatttaatgattaaggatagggatatagttttgagaaaattatagaagtggaatgaatgttttggattttaaagaagagggaatggaaatgtagttttgaggtagttaaagttaataaagttttttgatatatttattgtagaaataaatgattattttttaatttaaggtttgtaaatttaggtgattataggggtgaggtatggagtggaaatgggtaagagattaagtgggggtagtaatggttttgagtatatagatttaaggggagagattgttgtttggttaatgtttatgattagttagttgaaatatagatttagtgttgttagattttttgattttttgaaagaagttagagattttatatttagtgtaaatagtttaatttttaaattgagtaatttatttaaatatatttatgtaatttatttaaatgtatttagagtatgtttgattttttttttgtatttttatttagttttaggggtaattttaaggaaagtgatgtgtatatttgttgtatttatgtagatggaggattatttttttttttttaataaaagatatttttataaggattgagtgtggtataaagagtttgatttttagtatttaaattgagtaggaaatttaaatatagaagatttttttttgggttatatttttggtttttttaaatgagatttgattttttagatattgataaatattatattattgggttatggtaaatttttaagtggattgatttaaaagtgtttaaaagtattttaggtgttaaggaattgttggtatggagttttaaaggtgtttttgtataagaaatagaggtgttgattatgtatttgatttataaatattttttaaggatatattttgaatttggtaatgaagaaatattgtgggaattattaagttgaataaagtattagttttgttttttagaagtttattgttttatagaggagattagatatgtttatagataatttgaagtatatagtaataaattataggatgatttattttaagtataaagtgtatattgttattatagtggtaatttaggttataatttttaaatgtaagagttttaaatattattttttttatttttagtgatatgaaattatgttagaatatttgtagaaagtttgaattagtaattttaataataaatattgagtattgatatattgtatattattgagatttattttatatatattattttattaatttttatgattattttggtaagtattaatttttataattaagtagtgatagaaaatgaggtttagagagatatagtattttatttaaagttatagaatataagtagagaatgtagaatttgtattttgggttatttgatagtggagtttagatttttaaaattaggtttataaagattttttggaaaaaaagaaaaataaaaaatagagaataaatttttttgaagaaaagtaggaaattattatttataagtataattaaagagagatttttaattttttttttttttttttttttgagatggagttttgttttgttgtttaggtgtaattttagtttattgtaatttttattttttgggtttatgttataaagaaagtttttatttgattggtttgatttgattgtttattagaatataggttttttagtagggttaataagttataatagttttagtgatataagataaatataaattaataataaggttaatttagaattattaatatatgttttttattgtgaattattagttggtttatagatggaaaatataagatatataatgtattagtttaaaaaatgttttttagagagtgtttagaattatagaatttaaaaattttgttttgaaaaggtttaatttttattttaaaatatataaagaaattaaatgtaaaaaaattaagagaaaaggttttaattaattaaatgttgtataattttaagttttatttatgtttaagattagttttgtaatttatgattaattttagtattagtttgtttttaatttaggtttgttaaataatatagaattttttttttaatgaagttttttagggttttagttgaaaaatatatattagttaggatgtttttaattgtaaggaataaaaagttatgattttattgggtttaaataataatgatatttataattttatataaaatgaagtttaaaggtatggtttattttaggtttaatttttaaggatttatgttttgtttttgttgatttttttttagttttatttttagaggtattttatttatttatggatgtaaaatttttataatagttttagtagaaagattttagtatgataatgtttagggaagaaaattgattatttttttttttgttttttttttaggatgaatttattttttttagggattttttattggaggaagagatttttttatattttattggttaaaattatattatatattgttttaaatttaattattggaaaagggaatggtatttttataattgatttaggatattaggattattttttgggttggggtttgatttaggattttttaaagtatgtgattgagggtaggtattagaatggaattagagttgtgttagaaaggagaaatgtatggttattatagaatagttttaaatgttattgaggagggtataattgtaaaaattaaataattttttgttatttttttgaagttggtattttgatttttagatggttttttaatataggttttttttttttttattattatagttgttttgaaatttgagttggaagggaatattttgagatttagattgttaaatgttttttttaaagttatgtaataaattaaatggtaaagttagggtagttttttgatttagtatagggtatttttttttattttttatttttgagattttagaattgttggtattgttttaaaatttatggtaagaattggttatttttgtaattaatatttttttataatatatttgttttgtttgtttagttagttagaaattatatggagtttgtgttttaaaaagtttgttgaagtttttattttttgttttggtattatgtgtatgaattattaattggtttttttttattttatatttgatgaagatgttttttttttaatatttttttttattgttttttatttttttttgttttatttatgattagttgtttgtttttaaatagattttgtggttatttatttttttttgtgttagtttttatttattagttatttgaattgtggtttttattgttttttatatagtttatttatttgtggttgttatatatatttatattgttatatgtttttaaattgtattttggaatgattttggtaatggttgtattggatgagatttaaattaataattaaagtattgagatagtttttgttattataagtttatttttgtttttatagtttaagaggagttattttttttatttttattatttaatgtttaatattatttttattatatataatgtataaaaagtatgtgatttatgatttattttaaatttgaatgtttgtgatttattttgtgtttttttttatttttagg

SEQ ID NO: 237 - DNA, 16579 bp, Artificial Sequence
  chemically treated genomic DNA (Homo sapiens)
tttagaaatgaagaaaaatataaagtaaattataagtatttaggtttaaagtgggttataaattatatgttttttgtgtattgtatgtaataagggtagtattaagtattaagtaataagagtagaagaagtagttttttttggattataaaaataggagtaaatttgtaatagtagaagttattttaatgttttaattattagtttgaattttatttaatgtagttattattaaaattattttagaatatagtttgggaatatataataatgtggatgtgtgtgataattataagtgagtaggttgtatgaagaataatagagattatagtttaagtaattagtggataggagttggtataaaaagaaatgggtgattataaagtttatttagaaatagatagttgattataaatagagtaagagaagatggggagtaatagagaaagatgttgaaagaaaggtatttttattaagtgtaaggtgagaaggaattaattggtggtttatgtatataatattaaaatagagaataaggattttggtaggttttttaaagtatagattttatgtagtttttagttggttaagtaaataaaataaatgtattataaggaggtgttaattataaaagtgattagtttttgttatgaattttaaagtagtattaatagttttaaagttttaagagtaaagaatgaaagaaaatattttgtattgagttaagaaattgttttggttttgttatttaatttattgtatgattttggaaaagatatttaataatttgggttttagaatgtttttttttagtttaaattttaaggtagttataatgatgaggaggagaagaatttgtgttggggaattatttagaaattaaagtgttaattttaaaagaatggtaaaagattatttggtttttatagttgtgttttttttggtagtatttagaattattttataatagttatgtgttttttttttttaatataattttggttttattttagtgtttatttttagttatatattttggagaattttgggttaaattttagtttaagggatgattttgatattttaagttaattatagaggtattatttttttttttaatgattggatttggaatagtatataatatagttttggttagtgagatgtgaggggatttttttttttagtgaagggtttttgggaaagatagatttattttgagaagagaataaaggaagaggtggttagtttttttttttggatattattatgttggaatttttttgttggaattgttgtagggattttgtatttatgagtaagtgagatatttttggaaatgaagttgagaaagaattagtaaaggtaaggtgtaagtttttaaggattagatttagagtggattatgtttttgaattttattttatatgagattataaatgttattattgtttaaatttaataaaattgtgattttttgttttttatagttgaaagtattttaattggtatatattttttagttgggattttgaaaaattttattggaaaagaaattttatattatttagtaaatttagattgaaaataagttaatgttgaaattagttataaattataaaattgattttgaatataaatagggtttggagttgtatagtatttaattaattaagatttttttttttaatttttttgtatttgatttttttatatattttgaaataagaattagatttttttaaaataaaatttttaaattttataattttagatattttttgaagagtattttttaagttaatatattatatattttatattttttatttatagattaattgataatttataatgaaaaatatatgttgataattttaaattaattttattattagtttgtatttattttatattattagaattgttatgatttgttaattttattggaaagtttatgttttagtagataattaggttggattaattaaatagaaattttttttatggtatgaatttgggaggtggaggttgtagtgagttgagattgtgtttgggtgatagagtgagattttgttttaaaaaaaaaaaaaaaaaagaaattaaagatttttttttaattatatttataaataataattttttatttttttttaggaaaatttgttttttattttttatttttttttttttttaggaaatttttataagtttaattttaaaagtttgggttttattgttaaatagtttagaatgtaagttttgtattttttatttatattttgtgattttgggtaaaatattatatttttttaaattttattttttgttattatttagttgtgaaaattagtatttattgaagtgattataggaattgataaaataatgtatataaaataaattttagtgatatataatatattagtatttaatatttattattaaaattattaatttagattttttgtagatgttttaatatagttttatattattaagagtaaaaagaatagtatttggggtttttatatttgaaaattataatttaggttattattatagtagtaatatatattttatgtttggaataaattattttataatttattgttatgtattttaaattatttgtaaatatgtttaattttttttgtagaatagtaggtttttggaaggtagagttagtattttatttaatttaataatttttataatatttttttattgttaggtttagggtatatttttgaggaatgtttgtagattaaatatatgattaatgtttttattttttatgtagaaatatttttgaaattttgtgttaataattttttaatatttgaaatatttttgaatatttttgaattagtttatttgaagatttattatgatttaataatatgatgtttgttaatatttagagagttaaattttatttaaaaaaattaaaggtgtgatttaggaaaggattttttgtatttgagttttttatttaatttaaatattaaaaattgaattttttgtgttatatttaatttttataaaagtgttttttgttggggagaggagaatggttttttatttatataggtataataagtatatgtattattttttttaagattatttttaagattaggtaagaatataaggaggagattagatatgttttaaatatatttgaataagttgtataaatatgtttgaataagttatttaatttaaaaattagattgtttatattaaatataaaatttttaattttttttaaaaaattagaaggtttagtaatattaagtttatattttagttggttgattatgagtattaattaagtagtagtttttttttttaagtttgtgtgtttaaggttattattgtttttatttagttttttatttatttttattttatgttttgtttttgtagttatttaagtttgtaaattttgaattaaaagatgattatttatttttatagtaaatatattagagggttttattgattttagttgttttagaattgtatttttatttttttttttttggagtttaagatgtttattttatttttgtaatttttttaaggttatgtttttatttttggttattaagttatattttttgttttttatgtttgattatattaaatggaaagtttttagaagtttttttttttgtttttagtattattttaaatttttatttttatttttttatttttttatgttttttttataagtattgtttattagtgataataattttgtttgtatggaaagatttgagagatatgagagtgaatgtttatatttagttttttattttagtgaagttaatgagaagggaagaaagttattgaataatttaggtatagggtattgagattgtttaattgtttgggagatataaaagataaggttaatggaatttttatttatgagaaatgtttgtagggaggataagggatatattagggatgggtagtttttgagagaaagttaagattttattaaatagatatttagtatttttttttgattttggggaagtttagttgataaggggtgatttaaggatagagatatggtggttttgtttattattttgttaattaggtattttagataattaattttttaggatattttagttataaagtggatgtaatgagtattatatattatattgtttattggtttttttttatagaaagaattattgtatagtagagagaaattatgtgatttaggtgtgaaattttatgaatttattttatataagtaatagtattatgtgaatttttgaatttggatttggttaagtttttttatattgttgttttttagtatttttttgttttttgtttggtgaattttttttttattattttatttaagatatattgtattttatttttttttttatgttttatttttattttagtatatattattattttgtatatgtgattgggaattgtttttttttatttattatagtaaaagttttaatagagtagtttttgatgttttgtttatttttgtatttataatgtttagaatatttagtaaatatttgttaaaagaatgaatatatatttattttatataattagatgtataatatatatttagttttatttattaatttttttatttagaatataatatattttggagaatgttttaaattagtaaatataatttttttatgttatttttgatagttgtatagttttttattaggtggatatagtaatttttatttaaatggttttttatgatgagtttgttatattgtttttagatatttgtttttagaagtaatgttgtaaagaatatttttgtttatttgttttgggtgatattggtattaatatttatttatataataatgttgagaagtggaattgttgaattaaagagtatatatattttttaaaaatttttgataaagaattaaaaaaaagtgattgttaaattattttttgaagtagaggaatttatttatttttatataatagtatatgagagatttagtttttttataatttggttaatataaatttgtattaaattttttaattttatttttgttaggtatagtggtttatgtttgtaattttagtattttgggaggttgaggtgggtgaattatttgaggttaggagtttaagattaattgttatggttaatatggtgaaattttattttattaaaaatatgaaaattagttaagtatggtggtgggtgtttataattttagttattagggaggttgatataggagaattgtttgaatttggaaggtggaggttgtagtgagttgagattgtgttattgtattttaatttgagtaatagattttattttaaaaaaaaaaaaaaagaaaaaaattatttttttttgttatttttttgattggtgaaaaaatggtgtagtatattattggtgttttaattattatttatttaattatagatgaggttgagtgattttttttataattttaaaattttatgtttttttttgttattatttgtatataatttttgtttatattttgatagatgtggattttttaaagttatttataaaagtttatggaatattaagagttattagttttttgttttttaaatgttgtagatgttttttaaatatattatttgtttttgtgtaatttttatttagttagatttattagtattttttagaatggtattgggttttatgttttgtttagaataggtttttttatttttaatttattttttttaattttatgatttttttttattattttgtaaaaagttattttttatattttatatttgatttattttatattttttttaggatgagaaattaggtagagattgatttttattttgtatggatttattaattgttttgaaattatttattgaataattttttttttttattgaatgtttaattttattggagttaatttttgtaatttgttttttgattaatgaaattaaataatttttaaaataatatgtttttttttgatttattttatagatttagtagaaattatatggtttgggtaatgtagttattattaaaattatagaattagattaatatgaattttaagatataatatattattattttttttttgtatagttttttaaagtatttatttttttgatttttataattgtatatttatttaatagattatgatattaaaggtttaaaagtaatatttttgtttggtttttttagttagtgagtttaatttaaattttttgattttaagtttagtgtttattttattatattttaagtaatattaaattaataatttaataataaaaagattataatttattaaatatgtttattgtaaaatatgtaattttattttatagatataaatattttttaaaatttttagaagaatgaggtaggatgtatatagatgtggaaagtatatatatttgtatttttttatagttggtaaatttatttagaggtgtgttttaggaaatagaattgatatattaaataaagattttttgtattgatttttgaaatataattatttttaatatatttaatggtaagaatttagtagtgtttaaaaattttgtatatatatatatatatatgtattttatatatatatatagattttatatatatgtaatttattaagtttaggttataagaggaaattggtaaaaatttattaattgaaatggagtttggttaagatatttatatttaattttttttttttgattttaaattagggagagtatatgttttgtgttttttggtaaaatatagatttatgtaataattagtatatttttttagattagagtaagtaatttttaataatgagtgtttgttagttttaattggtttttttatgtgggtggtgaaaaaatattttattatagttattaatttttttttttaaaagaattatgtgttttgagaagttttgttttattatagggtaatattttattttaaatatagtgtttattgatgtttgtttatgaatgatgttaataaaaatgtttaaattttattaggaaaggagggtttagttgttagattttgggagatagagttagttgatttttgtgtttttaaaggttttgttatttaattaagtgattaattattaattttaaagtatttaagtttaataatataataaaagagagaataatgggtagtatttttaatattaattatggttatttttggtttagttgtttaggtttttttttagtagaatttataagtgtatagatataggtattttggaatattaaaggtatttttttttagtttgtaaatatagggaaaaagaagaaatttatatttgtaaatttatgtaaatttagggggattttttttaaattttgtttttttgaaagtaggaaatataatttaaaattaattttgtttttatttattaaaagaattaaaattttgaattttgatataaattttaaatgattgttttgaattttattttgttttttatttaatttttttataagaagattaaggattgtggatttggtgttggaggaagtaattgtttaattatattggaatttattggaattttttataatattattgtgggtagataatataattttaatatatttttttttttatttagagtttagaataagaagttagatttttggagattttttttttgatgtattgtttttaatatttttaagttataaattgggaattgtttttattttagaatattaattgttgtttttattggtatttttttatttttatattatatttataatattttattttaggattttatgtgaatatttttaggatgggtttggtgaaattgttaagaagtgtttaaaataattaggttatagtttttagtagataaaaagaaaaagatgtggttgttagttatagaatttgaggtgatggaaaagatttttaaaatttagtttttttaatatgtagtaaaatgggaggatttaaaatgtagttttaagaagtattgttttgtttgtattaagtttttttaggtttttagtttagttattttttaaataggtgttgagtttttagtttttgttaggtttttgttaaggttttttattgaggtataggaattttagttatatttgtagtttttttatgtttgtttttatgaaattttattagttttgttgaatggtagtatttgttattttaggtgaattttttatgatagtttggaatgaaattaatttgttaattgattaagaatgggttttagagtgatttgaatgtatttaaaaagttaataaatggaatatggtataaagttttatttttttgataaaaagtttgtttggagtaaattttaattttttttttgttttaaaataaaagtatgatgttttttttattatttttaagaagtaagtaaaaataaaataaaataaaataaaatttaaatagttttttaataagagtgtttagtgttgtttggatggaatttgggttagttttagaagtagttggttttgaattttgggggtgaggttatttggtttttttggttaagttgggttttgttttttttgttttgtttttattggttttggtgggtgggggttttggttgtgttggttgtttgtgtggttgtattgtagtttttgagtttaggaagttatatttgttttggttgggagttgaagtgttaatttatgtggtggttggttaatttagttgttgtggggagtgtttgttgtgggtttttttttggtgtgaggtgagtgagtgggggtgggttttagatttagtttttttgggtggggttggattatttttgtttgtttagtttttttttatttttttattttggtatgtttttgtagttatatttgttgttgttgggaaagggaaaagagtattttaaaatgagttttgaaatttagatttaaattttgaaatgaatttttttggtttgtttttggttgtttgaatgttatttgttttatttttgtttttttttttttttttttttttttatggttttttttttttttatttttttttttttttttttttttttttttttattgtttgttttttttttatttttttgtttgatgtttgttttgaagttgaggaagtttaagttttggattaggagttttttttttgtaatattttggggtggggttttattgttgggtttaagtggttatgggttttgagagtatggtatgtgtattattttttttaaagatgtttagggtggtgtgtttagatttttgaaatttggttttattttggttatgtgtgtttgtttattaagtggtgaattggatttagggtgttgtgtgtgttttagttgatttgtgagaaggtatttttgtattttgtatagattaagatttttttttagggttttttaaatttttagatgtatgttgtagattgtggagtgtaaaatgaatgatttaagggaaaattagggttttttatttttgaatataaggttgtgaaagatgtatgtttggtttggggggtttgtttttttttgtttgtgtgggatttttttattagggggtgtttatatttgttgtaaaatttttaatttttagatatttaggttttgtaagttttgtgagttgaattgggggtagatttgaaggagtgtattgttttttttgtttttttttttttgttgttttggagtatgggaaaggtagggattttatattagttatttatttgttagttgtgggggaggggatgtagaagttagagagagagaatagaggttgggagaggggaagggaggtagagaagatggagatagagggagatataaagatgaggaatgtgatttagagagattttgttgtgggtgtgtgtgtggtaggataattttttaggtgttgtgtagatttttttttttttttgtagtattttttagggatatgtaggatttgttgagatgtagttggattggagagtaaatagtttaggttatgatattatttttttattttgtttttttttgtttaatatttagattgttttatgtttagtgatatagattgtgggttagaataatttggatgttttaggtttgtatgtattagggatgttgttttatagtgtttatgtttttgtaggatggtggggtgttttagttgaggatgttttttggggtttttggtatatgtgtgtgttgttgttgttagatttgttagtaaagttgtttaattagagtggagaattaggagagggtggggaatatgtaaggaaatggaggatttttgtagtttgggtgagaggattgatttagaggtttttgatttgggtttttgagttatttttgtttgtagtgtgttttgggtgttggtttgtttgttgagatgggagtgatagattttattttattttttagggtgagaaaaattgttgtatatttttgttgatttagaataggttttttttgtttaggggttttttagatttttgtggggttttaataattttattttttattttttgttttttttttgttggtttttttgtattgtgtgtaggataaaagaatttaggggtgttgggagagaattgtgatagtttttaagttgttaaagagatatggtggggattttgtattttttttggttggatttttttttagattgtttgtggtttgaaggggttaggtttgtgtaaggttttaggttgtttgggtgttgggttgtattgttaggagttgtttgggagtggttttttaggaatattaggtattgattatatattaggggttgggaaattaggtggtttgtattaaggtggttttggggatttgtttgtggtaagttttggtagtttttatttaaatttttgttttgagtgtgttaagaataataataataaaaaaattaaagtgttaaaggttttttttttttttttagtttaagaatttattatttttttatgatttttttataatttattttttttttttttttaattttgttagttattttatttttattttattttgggttttttttgtttgaattttttttaatattaaggtttttttgtatgtttttttttaaaagtttttatgaaagttatttgtattttttaagtgtttatatttttttaattttgttttatagttttttgttttaattaaagttttttattaattgttttttttttttaagtttgtgggtttttttttataagttttttgtttttgttttttaaggggggaataaaagaaatgtgattattttggaaggtggtttattgtagtttggggggaaaatttattgtagtgttgtgtgattgggtttggtgttgtttaggtgggttatataggaagtgtggtggtttggggaaggatgtggagggtgtgggatggtgttggaagatgtgggaggatgtggggttggttgaagattttggttttagtttttgtttataatatttaatgtttttggttgttgtgtttgtatgtttggagtttttttttagaaaggtttggggtagtttgtttgtaagtttaaatgtgggttgtgatatttattattattatattattgtattgttagagttgaggaggagatttagtgagaagaaggaggagggagaggaggagggtttatttataggttttaaaagtgttttgtagttttagttatttttaagagtttaggtttggaaagtaggtggaggggtggaaaggtagttttttgtgtttgtggtagggattgtttgtttttttttttaggtatttttattttttggtgtttttttttgataagaagtattaattggtttggggatagtagtgttttttatttagggatttatttagtaatattgttttgtttgtggaaattattgtttttttattttttttttatttttatttttttgttttttgtgtagttagttttgggttaggggaaaggagtttttaggtttttagggggtaggttagtaatagataattgagtatgattatttttttttgggagtatataaaattgtaaaattagtaaagaatttggttatagtgtgtttatgtgtttatagagtttgtttgttttattaaagggaagtgttaggtttaaggtttttgttaatttgaaagagatattgagaaaatgagattttttggggatttagagggaaagtgtaagaattttttattgtatttttagggaattgtttaatggggagtttggttttaaaagattttggtaataaaaggttggataggaaatttttttaggtaaattttttgttggatttaaagagaatattttttttttgttataaatttttttttatataagtttagattttgttttttttgtttttttttttttttagtttttttaagtatttttgagtagaatatttgataatttttttgagtaatagggattttttggaagtattaattattttttatgttttttggaaataagattataattttttatgtgtatatgtgattttttttttttagttaggtttattttattgtgtaaatagtattaatatatggaagagttttttgtattgtgttataaaagatttttaataggattttatagagaaaagggttaaatagttgatataaaggatttttgtttttttagaaaagagggattttggattttttttttttttgaagttaagtatgagtttatataataggaataaaataaatttaaggtgtatattagtataatattagggatattagaatggatggtaaatttttttttttatataaatatgaaagtatttttataatttttttttttgaagtttttatttagaaaattatattaaatataggattttaaaatagtagtgattaaagatgaaagttaatttttttttttaatttttttgattagtttggtttaaatttatgttttaaaatttttagtaatttagatttttgtatatgtgtatttataagattttttttatattttgtaatttgtaggtatttagtatggttattgattttaagtgataaataggtagaagatttgttaggataattttagtttttattatgtgtattttttattttttttgttatttattagttttttgtagtaatataattgttagttatattatttggaaattaatgtgtttttgtagtgaattatttatttttagtaaatttattgtattattattttaaatattgaaatttgattttattagatgtttagaatgatagttatagagtagaattagattttaatttttatgtataatatgtaaataaattaaggtgtagaaagttattgttttaaagttatataattaatagtttagtggtttttttagtgttaattatagtaattttagatttaagattgtttgatttaggaatggagagaaataaaataaaatgaatgtttattgaaatatatattttagatattaagatagatttttttgtgaaatattttaagatgtggatttgtatttttatttttaaatttgagtaaatttagttgagttttaaagagtttaagtaatttgtttaaggttattttgtaagtgatagatttgttagtttgaaaagtttattattttttatttttttgtttttttatgatatagttaagtaaaattttttaataaaggagaattagattagaaataagtaattaatagtagattaatgtttatttttagggaaatgttaatagttaatatttattataaataatgttatttgtatataatggaatatgattgaaagtgatgggttagatattttttatattttgagatgtttttatttatgttgttaaatttgattttttaattttttaaaatttttagttttttttaatgttaatagattttataatatttgattaaatatttttataggataaaggtatttttttagggttgatttaaggaattagaatatgtataatgttgaaaagttttaaattgtttgtttttttttttttttgatttgtaatattattatttagaaaattaaatatttttttaggttattagataattaaaatgaaattatattttatggatattttttttttatttttagggtagatttttttttttagttgtttaaaatggagaatggataaaaaagaaaaaggaaaatatattagttatatttagaatagagtttatagttgtattattatttttatgtaattgtttttaatgatttttttttattaagagaaagaaaatgagagagtatttatttttgattttttaatgtttgataaaattattagaagtttttgaatgggaaaatatatattttttaggttttataattaaaattgtatttatttgtttattatatttaagtatgaattaaatagtaattaaaatattattttgtgagtttttttttaaattatatttttgtattggggatattttttgtgaaaattttaagattttaggtataaataaagtaagatttttatttataatgtttgtgtttaaaagaaattataagttagaagttatgtgttttgtttttttgttttgattttgtttttgggaatttggttgagtttaggggtagtaagttaatgatttggagaggaaaggtgtagatggtagatgtgtttttagggaattttattatttttatttaaatttttttttgaggttttttaggattatattttagatttttttttttttattgattaggtgaagtgtttttagatatggtattatttattgttgttttagggatgataagattttagttttatttaaatttagaaagagtttagttttaattttttgatttgattggttttaggtataattaagtaaattatttttattggatgatatagtaatgttatagattaaaaatgtatttttaatttttaaagattttggaaaaaggaagtttattttttaagattgtgttataattttttttttaaataaaatattgtaaattagggatagatattttatttagtattttgaattttttttggttttttaggaaaggtagaaatataaggtttttattgttttttttttatttttaaaaaagaaattttgtaaaaggtaaagtgatggtggtaattttattgtgttttaatttgaagtatataaattgttttgataaattaaatatagataaatttttttagaaagttataaaatattagattttttttagatattagatattgagtttttgttttttaatttttaaattaaaatgttatagtaaaatatttgttttaataaattttttttttttttgtgttgtaaatgttttgtttatggttgagtagatttttttagaatttaattgaaagattatttatattatgatagaattatgtaagttaaagttaagttttaatatggagtgatgggagaggttgggttgttgagaggagatgattttattagtgagaagagaggttttttgagttggtttttaaggtagttaaatggtttagtatatttgtatttattttgggaggttgtttggagtagagtattaaaaatgttattttttttataaagaaaaagatgaaggtataaagaatatagtttaattaaattgaattaaagattgtattatttttattttttttttagttatttttttaaagttttttttttttttttttatagtttgaaaaatataggttatttttataaagtatttgtttgattgaagtaagataaattgaagagtttggtttttgaatataaggaagtggtagagattttagaattaatgaggtagggtggaatataatgtagaaggttttttaagaggtaaaatttttgtagttgttgtttatttttagtgattatttgtttttatttatttaattagattatagtgggattgagataaggagtataatgaaagttgttgtattgatggtgtaaaaagatatatggtattattaatgtttttgtggtgagtaaaggtagaatgtaagatagaaaataaggaaatttttgtgttgtaagaaaagtgtttagtatgggtattaattggtatgtagaagtagtaagtatatattttatttttattttattgataaaaagaattgtaggattaatgtttgtttttattaaaatatgagaaattatattttaattttataaattaaaggttaaatatttgttgtaataattttaaaaaaaagagaagatttgtaagatttagtaaatatttattataaatagattgtttttaattttttatatttttttttaatttaataaaagtttattgagtagtttttatgtgtattgttttagatagtaggtattatttaaaaaagtaataattattttttatttttaaggagtttataatgtttttagaaagaaattaatttattggagtagttaaagttataattgatttataaaatgattagtgaatttagaggaaaattatatataaatatttttgtttttattggttggtttagttagatattattttaaaaaata

SEQ ID NO: 238 - DNA, 6090 bp, Artificial Sequence
  chemically treated genomic DNA (Homo sapiens)
tagagatggaatgtttaaattaggataatttagggaggtgtgggagaggtgtagggggattataagggatggagtaggaatttaaggtagtaatagtagagttggtattaattttaggtttaaaaagataaaggagagagagtggttattaaaatttagaaagagaaaatttggtaaaagatgggatttggtgaggagtagtaatttgtgtttggttgtggattgtggtaattttgtagggaggagagtagaggaatgattattttggttttatttttttttttttttttttattttatgttaggtgttttattggttaaatttattagtaattagaggataaggaatgtattaaaataattttatggtttagagagtagattagatgtagagtgataaatggattatatttagtataattgtaggtttatttgttgatttgttttttttattagattgagttatttgaggatagagaatgttttttttatatttgtatttttaatatttggtggatattagatatttaagaaatgtttatggatgggattagagaagatggtaaattgggtattagatggaggtttgtgttttttgagtttgttgtatgttttttggtgaatttaaggtaaaatgagaaatagaatgagttttgtatttttgtttggtaaaagaaaatatgatttggtgagaagaaatgaatatttttagtatttagtgttgggaggaattggaattagttatgtgattgtttttattagaggtttttaattgtgtaatggatagaatttttaatggtgaaattataatgtagaaatatttttttttttttttttttttttttttttgagatggagttttgttttgttatttaggttggagtgtagtggtattattttggtttattgtaagttttgttttttgggtttattttatttttttgttttagttttttaagtagttgggattataggtatttgttattatatttggttaattttttgtatttttagtagaaatggggttttattgtgttagttaggatgtttttgattttttgattttgtgatttgtttgttttggttttttaaagtgggaaatatttttaaaaatattagtttttgataaaattaaagttatgttataaaaaagtaattaaaaggtggaaatgagataatatggtttattttgagttgagaatattttgttagaaaatgattgttttagattttaaatttgattttttatataaatttttagtgtaattttttttgtattatttttttttttattagttaaaagatggaaaggataaattgaggaatttatgttggaggagtatggatttattagatggtagaaatttgggtttttgaatgattattgtggagttgatttttgtttatgttttgtaaatttttgtgttgagagtaagtaatatatttttaatgtgttaaatttttgggatttgttgggttttatagtaatggttattttattttaatatgattgtaaaataatgttttaaaatttatagttgggtttgtttaaaatattattgttattattattataatttatagtttatattataattatttttatagaagttttttttaattggtattttataatttgtggttttttatattgttgttttttatgtgtgagatgtttttttgagttttttttgttagggatatgatagaaaataaaatatttaatattttggtgtattttataatgtataaagttttgttttatgtattatttttttagatttttttaataaatttaaggaatatgtaagggtttataattatttttattttataggtgatgaaattgagatgtttatatgtaaagtggaaataattatttatttatttatttatttattaaataaaaattttgttaatttatttaaagattaattgagagaattattttatttgtttggaatttggtatgtgttaagagaaaagtttttttaatttttttttttaagaagataatttattgttatataataaattattttgaaataatgatttaaaatattaaaagttattgattttgtttatagaatttgaattggaagatataaataattgggagtgagggtggggttggatagttggtttttttgggtattttttgttttttttgtggttttgttatatgtttttatatggtagttttagggtaattatgatagttgaaggttttagagtgggtggagggggagagggagggagggaaagagagagagagagagagagagagaaagagaagtaagtaggtagaagttttaatgttttatgatttaattttggaaataaattatattgtgttattgttattatttttttttagaagtaagtagatagggttggtgaatatttattgagaggggaattagattttattttttgattgggggagtgttaaagaatttgtgaatatgtttttaaatgattatattttttttttttaaaatgtttgtttaaattggtgtatataaaaagtttgggggttagtgatttatttaaggttattaagttgttaaatggttttattaatattagatttaattttgtgattttaaattttatgtttttttttattattttagataatttttggtgaatattattgtttattagggtagttaagatattttagttgttaaatagatttagtttttttaattgttttggataatatattttttattttgtagaaaataaatattatttatatggtagttatttataaatattttttaagtttattttaaatatttgtgttttaaatttttttttttaatagatgtatttatttgtatttttttagatgaattattttttttttgttgttgttgttatttttgattgtattttttattttttaagatttttttgtattattaagtttattgtttaagttaatattattttttaatttggggatttttttttgatttttgtgtgttttttttgtgggttattaatgtaatgttatttaagattaggatttggttgggtgtagtggtttatgtttgtaattttagtattgtgggaggttgagttgggaggattatttgaggttaggagtttaagattagtttgattaatatggtgaaattatgtttttattaaaaatataaaattagttgggtatagttatatgtttgtaattttagttattgggtagtttgaggtaggagaattgtttgaatttgggaggtggaggtggagtttgtagtgagttaagattttataattgtattttagtttgggttataagagtgaaaatttgttttaaaaaaaaaaaaaagattaggatttgatataaggtttgaggggtatttttttgttttgttttgttttgtttttaagaggttaaaatttttatagttgaaaatttttgttgaattatagagatttgaattaatttagtttagaaagtttggggatttgaataatggtatggattggaaatttttttatttgttagtttttattattttaggtagtaaaatagatttttttttaggagttttttattgtttggggttttttagtagtgggatgtggggaattaatttttttttgtttttatttaaatattaggtgggagtaaggggtgggaagtagagaaagtggatagaggtttttagtggatatgggatttttgtgtagattagtatagtttttagaaattttatgtaagtaatataggtattgttatattttttagtggttattttttaaaaagtaaataggtgaggttgggtgtggttgttatgtttgtaattttagtattttgggaggtttaggtgggtggattatgaggttaagagatggagattattttggttgatatggtgaaattttgtttttattaaaaatataaaaattagttgggtatggtgatgtgtgattgtagttttagttattggggaggttgaggtaggagaattatttgaattttggaggtggaggttgttatgttttattatattttagtttggtgatagagtgagattttgttttaaaaaaaagaaagtaaataggtgaaattaattttaataatatattttgtttaatttaatgtatttaaaatattattatttgaaagtgtaatgaatataaaaatatttatgagatattttttatttttatatttatattgttttggattttaatgtgtattttatatttatagtataattaatttgggattagttatattttagtttaataatagttaatagtatatgggatagtgtaaataaattttgtgtttttgttgtttttttgggttttggagattttaattttttttttagattgtaaatttttttgtttttaagttttggttttaatattagtttggtagaggaatttagtttaatgaggtatgttttttttttgttattttttattttattaatttgttttgtggtaaatgtaggattgattttttaaaattattttattaattagtttatatatttattatttatttgttttattagaatgtaggtttttggaaggtagggatttaaaaaaatttgttttgttttatgtgatttttttatattaagtattgtgtttggtataagttgggattttagtatatattttgggatggaagaattgtgtttttttagaatttagttagagggtagtttagtaatgtgttataggtggggtgtttgtgttttgggtggatgtattggttttttggttggtgtgggtgtggggtgagtgggtgtgtgtggggtgtgtgtggtagagtgtgttagtgagtttggagtgtggagttgggaggagtagtgagtgttgtgtagaatttgtagtgttggtttggtagggtagtttggaggtgggtgggttgtgttgttagtttgtttgtagggtttttattggttgtttgttggttgttttttgtttaaaaggtggtaaggagttgagaggttgttttggagtgtgaggaggatagttggattgagttaatgttggggattttgttttttttgtggaggggatttggtaatttgtagtggtagggtttggggttggtgtttgggagggatttgtgttttttatttattttttagttgtgtttttgttgtgttttggttagtttttggtgttggtgtttatggttggtttttgatagtgttttggagggattgggggagtttttaggtgtttgggtgagtagttaggtgtggttttttggtttttttgatttttggtgttagtttttgtttttttagttagggtgtggtggggtttgtttgggtagtgttttgagtaattgggaaggttaaggtggagggaaatttggttttggggagaagtgtgattgtagttgggaggtttttttagttttgtgggttgggtgagaataggtggtgttggtttgattaggtgttttgtgttggggtgtgaggatttggagtgaattgttgtgttttggtgggttgttttttttttttttttgtttttttgggtggttgtatgttgggttggttgggtaatggagagggagttgttaggaatgtggttttggggattgttttgtttggggaaggggagagggtggttatggtgttaggagaggtgtgggagttgagaggtggtgtgggggtgttattgttgttgtaggttggagagagattgtttttagtgaggtgtgtattgtttgggtgagggttttatttttttgtggtgtttttggaggtgggaaagttgggtgggtatgtgtgtagagaaaggggaggtggggaggttagttatttttggagttggttttgattttaatagattgtttagtgtttggggatgttgattttggggtgttgtggtgtttggttttatgtgtgtgtggggttgaggggttgggggtgtttttggttgtttagttttaataaagggtgtttttttttattttgtgaggaggggtagttttggagatttggtttttagtgagtggggttttagtgttggggaggtttatttttttttggggttgttattttattattattattgttttttttttttttttaaaagg

SEQ ID NO: 239 - DNA, 6090 bp, Artificial Sequence
  chemically treated genomic DNA (Homo sapiens)
ttttttgaagaaaaaaaaaaggtaataataatagtaaaatggtaattttaaaaggaagtagatttttttggtgttaagattttgtttgttgaagattgggtttttggagttgtttttttttgtggggtggagaggagtattttttgttaaagttgggtggttagggatgtttttgattttttagttttgtgtgtgtgtggggttgggtattatggtattttgaggttggtgtttttaaatgttgggtggtttgttgggattagaattggttttggaagtgattggtttttttgttttttttttttttgtatatatgtttatttagtttttttatttttagggatgttgtggaagaatgaagtttttgtttagatggtatgtgttttattgggagtaatttttttttagtttgtggtaatggtggtatttttgtgttattttttggtttttgtgttttttttaatattgtggttattttttttttttttttgagtgaggtagtttttagagttatatttttggtgattttttttttgttatttggttgatttggtgtgtggttgtttgggggagtaagggagggaagggagtggtttattgaggtgtagtagtttgttttagatttttgtgttttgatataaagtgtttggttgggttggtgttatttgtttttatttggtttgtggggttggggaagttttttggttgtgattgtatttttttttgaagttaagtttttttttgttttggtttttttagttgtttgaggtattgtttggataaattttattgtgttttggttgggaaagtaaaagttggtgttgggggttggggggattggggagttgtgtttggttatttatttgggtgtttgggagtttttttggtttttttggagtgttgttggaggttgattataggtgttagtgttggagattagttggggtgtggtgggaatatagttagggagtgagtggggggtgtagattttttttaggtgttggttttagattttgttgttgtgagttgttgagttttttttgtggagggaataaagtttttggtgttggtttggtttggttgttttttttatattttgaagtagttttttggttttttgttgttttttgggtggagggtggttggtaggtggttaatggggattttgtaagtgggttggtggtgtggtttatttatttttgagttgttttgttaggttggtgttgtgggttttgtgtggtgtttgttgttttttttagttttgtgttttgggtttgttggtgtgttttattgtgtatattttgtatatatttatttgttttatatttatgttggttggggagttagtgtgtttgtttggaatgtgggtgttttatttgtgatatattgttaagttgttttttgattgggttttagggaaatatggtttttttgttttgagatgtgtattgggattttagtttgtgttgggtatggtgtttggtatgggaaaattatatagaataaaatagatttttttaaatttttgttttttggaaatttgtattttggtgggatagatagataataaatatgtaagttaattaataaggtaattttggaggattagttttatgtttattatgaaataggttaatggaatagagaatggtaggaagggagtgtattttattagattgggtttttttgttggattggtgttggagttgaggtttgaaggtaagaaggtttgtaatttgaagaaagggttgaggtttttgagatttaaagaagtaatagagatgtagagtttatttgtgttattttatatgttattggttattgttgagttgaaatgtagttagttttaaattaattgtgttgtaagtgtaaaatatatattagagtttaagatagtatggatatgagaatgaaaaatattttatgaatatttttatatttattatatttttaaatgatagtattttggatatgttgggttaaataaaatatattattaaaattaattttatttgtttatttttttttttttgagatggagttttattttgttgttaggttggagtgtagtggagtgtggtaatttttatttttagggtttaagtgatttttttgttttggtttttttagtagttaggattatagttgtgtgttattatgtttagttaatttttgtatttttagtagagatggggttttattgtgttgattaggatggtttttattttttgattttgtgatttgtttgtttgggttttttaaagtgttgggattataggtgtgatgattgtgtttggttttatttgtttattttttaaaaggtggttattagaaaatataatagtatttatgttgtttgtatgagatttttgaggattgtgttggtttatataaagattttatatttattggagatttttatttattttttttattttttattttttgtttttatttaatgtttgggtggagatgaagaagggttgattttttatattttattgttggagaattttaaatggtgaaaagtttttaaagggaaatttattttattgtttagaatgatgaaaattgatagatgaagagatttttgatttatattgttgtttaaatttttaggttttttaaattgagttggtttaaatttttgtggtttaatagaaatttttaattgtgaagattttggttttttgaaaataaggtaaaataaaataaaagaatattttttaggttttatgttaaattttagttttttttttttttttgagatgggtttttgtttttgtggtttagattggagtgtagttgtgaaattttggtttattgtaaattttgtttttgttttttgggtttaagtgatttttttgttttaggttatttagtagttgggattataggtatgtgattatgtttggttaattttgtatttttagtagagatgtggttttattatgttggttaggttggttttgaatttttgattttaggtgatttttttggtttggttttttatagtgttgggattataggtgtgagttattgtgtttagttaaattttagttttaaataatattgtattaatgatttataggaagggtatataggaattaaggggaagtttttaaattgggagatggtattagtttaagtagtgggtttgataatataaaagggttttgagaggtgagaaatatagttaaaaataataataataataaaaaaagagtgatttatttgggaaaatgtaaatgaatatatttgttgggagaaaaaatttaaaatatagatgtttgggataaatttggaaggtgtttatggatgattgttatatgggtaatatttattttttgtaaaataaaaaatatattgtttgaggtaattaaaaggattgaatttatttggtagttagaatgttttaattattttaatggataatgatgtttattggagattatttggagtagtgaaaaagagtatgaaatttggagttataaaattagatttagtattggtggaattatttaatagtttaataattttggatgagttattaatttttgagttttttgtgtatattaatttagataagtattttagaaaggggaaatgtggttatttaaaaatatatttataaattttttgatatttttttaattaagaggtggagtttaattttttttttaataaatatttattaattttatttgtttgtttttaagaaaaggtagtggtagtggtatagtgtaatttatttttaaggttaggttataaggtattagagtttttgtttgtttgtttttttttttttttttttttttttttttttttttttttttttttttttttttttttatttattttaaagtttttagttgttatgattattttagggttgttatgtagagatatgtgataaaattatagaaagaatgagagatgtttagagaagttagttgtttagttttatttttatttttagttgtttatattttttagtttaagttttgtgagtaaaattaatgatttttaatgttttaagttattattttagagtggtttgttatgtagtaatagattatttttttaaaaagaaaaattaagaaaattttttttttaatatatattaggttttagatagatgaaataatttttttaattaatttttaaataaattagtggggtttttatttaataaataaataaataaataagtggttatttttattttatatgtaaatgttttagttttattatttgtgaaatgaagatgattatagatttttatatattttttgggtttgttgggagaatttaaagagataatgtatgaaataggattttgtatattataaaatatattagaatgttggatattttattttttattatgtttttagtaaaaaggatttagagaggtattttatatatagaaggtaataatataagaagttataaattatgagatgttagttgagaaggatttttataaaaataattatgatatggattatggattataataatgatggtgataatattttaaataaatttgattgtagattttagaatattattttatagttgtattagggtaaaataattattgttataagatttaataaattttagaggtttaatatattaaaaatgtgttatttgtttttagtataaaggtttgtagggtataagtagagattagttttatagtagttatttagaaatttaggtttttgttatttaatgaatttatgtttttttagtgtaagttttttagtttattttttttattttttggttgatgagagaagagataatatagggaggattgtattgaaggtttatgtaggaggttagatttgaagtttgagataattattttttggtaagatgtttttagtttaaagtggattatattattttatttttattttttggttgtttttttgtaatatggttttggttttattaagggttaatatttttaagaatgttttttattttgggaggttgaggtgggtagattatgaggttaggagattaagagtattttagttaatatggtgaaattttatttttattaaaaatataaaaaattagttaggtgtggtggtaggtgtttgtagttttagttatttgggaggttgaggtaggagaatggggtgaatttgggaggtggagtttgtagtgagttgagatggtgttattgtattttagtttgggtgatagagtaagattttgttttaaaaaaaaaaaaaaaaaaaaaaaaaagaatgtttttgtattgtggttttattattaaagattttgtttgttatgtagttgagagtttttgatagaggtagttatatgattgattttagttttttttagtattgagtgttaaaagtatttatttttttttattaaattatatttttttttattagataaaagtatagagtttattttgttttttattttgttttggatttgttagaaagtatgtggtaagtttagaaagtataaatttttatttaatgtttaatttattattttttttgattttgtttataagtattttttgagtatttagtgtttattaaatgttagggatatagatataagagaaatattttttgtttttaggtaatttagtttgatgagggagatggattaataaatagatttgtgattgtgttaaatataatttatttgttattttatatttaatttattttttgagttgtaagattattttaatgtattttttgttttttggttgttggtaggtttagttaatggggtatttgatatgagatgaaggagaaggaaggagagtgaagttaagatagttatttttttgtttttttttttgtaagattgttatagtttatagttaaatataggttgttgttttttattaggttttgttttttattgggttttttttttttgggttttggtaattatttttttttttttgtttttttgagtttagggttggtgttagttttgttattattattttgggtttttgttttattttttatggtttttttgtattttttttatatttttttgaattgttttaatttgagtattttatttttg

SEQ ID NO: 240 - DNA, 5286 bp, Artificial Sequence
  chemically treated genomic DNA (Homo sapiens)
tattttttgtttatttagattttttttttgtttatttgttgttgtgaattttgtatgttatatatatatataaaatatgtaatatattatatattatatgtaatatataatatataaagtatattatataatatgtattatattatatattatataatatgtaatatattatataatatataatatgtattatattatatattatataatatgtaatatattatataatatataatatgtattatattatatattatataatatgtattatattatatattatataatatgtattatatattatataatatgtattatatattatataatatgtattatatattatataatatgtattatatattatataatatgtattatatattatataatatgtattatatattatataatattataatatgtattatatattatataatattatataatatgtattatatattatataataatatataatgtgtattatatataatataatattatataatgtgtattatatattatataatattatataatgtgtattatatattatataatattatataatgtgtattatatattatataatattatataatgtgtattatatatataatattatataatgtgtattatatatataatattatataatgtgtattatatatataatattatataatgtgtattatatatttaatattatataatgtgtattatatatttaatattatataatgtgtattatatattatataatattatataatgtgtattatatattatataatattatataatgtgtattatatattatataatatatgatgtgtattatatattatatattatatgatgtgtattatatattatataatatatgatgtgtattatatattatataatatatgatgtgtattatatattatataatattatatgatgtgtattatatattatatataatatataatattatatataatatattatatataatatattatatattatatttatataatttatataatatattatatattatatttatataatttatataatatattatatattatatttatataatttatataatatattatatattatatttatataatttatataatatattatataaatatattatatatagtattatatatataaaattatattttaagttttagggtatatgtgtataatgtataggtttgttatatatgtatatatgtgttatgttggtgtgttgtatttattaatttgttatttatattaggtatattttttaatgttatttttttttgttttttttattttataataggttttagtgtgtgatgtttttttttttgtgtttaagtgtttttattgtttaattttaatttatgagtgagaatatgtatgttttatatgtttttaggtagagaggaaattgttgagtaggttggggtaggggatagagttttgtggttttttattttagattttttttggttgattgttatggaatgtagttatttagtagggttaaattttttgatgtttttgttggttgtttagtttttagggataggttatgggattttggtttttgttttgttatttttttagttattttgatttttatggggaggaatagtttgggaaaggatttggttatagtatttttattttagggttattgaggattttatagttgtgtgtttggtgggttttgtttagagtttatttgagagtagtggatgataggataggtttatgtgatttaggtaggtagtaatattgggttagtttttatgtttttttttgttagttggggtagtttggaagtatgattgtggggtaggtgttatgggtatggaatagattttaggtggaggttgtaggggttttttggtattgtagatatagtaggtttaggagtaggggagggagttatgatttagggagattttggtttatatttttggtagatgagggttataggggaatgggtagtattgtttaaagttttttgggttgggtttgtagttgtttttggtttagattttttggtgggttggttagaaatatgtagtaatttggggtagttattaggtggttaagtttgtattgttgggttttgtgagtttgggttagtttaggttttttttgggttttgtttttttgggttgtttgggtggttttttgggtttggggtgttaatgtttttggatgggtagtagaattagtttgtatttagggttttaggttatgtttttggaatatatttttagtattgatagtagtgtgtggtgaggttttttaggttgggttttggtttagtgttaggggtattattattttattgtttttagagttatttttgggatattggttgtgagtttagatgttttgaatagggatagggagagttagagggaattagtttggggtttattggaggggtttgtgggtagatagtgttttttggagggaattgagtttgaaaggaaggaaattttttttttggtttatagtatttgttatttagggtttttttagggttgtgtgaattttagttatgtggtgataggttgagttattatgttaagttattgtgtgtttttttgttgttgtgatgttagtttttttatttttttagttaggttggatttttgtgagaggtttgtttgttttgtattttgtgtagatgttttttattgtttgttggggttgttgggtatgttttggttggttttttggattaggtaagtttatgagttttttggttgtttttgttttttttttgtttttgtttttttttggaggtggttatttttagattttagttttaatttggaggttttttgaggagtgttgtagggggttataggtgtggttttgagttattttggagagtggtggggggtttagttagttttgtggttgggatttttttaggtagataagtttgtttttttttttttagtgggtgtagtttagaattgttttttgaggaagaggtgtttttttgggtttttattgtttttaggttttaggtaagtttattagggttttaaggaagggggtttgggtttgaggttaattatggtagttgatttattttttagttttagttttttttagtgtgtgtagtttttatgttgtttgggtgagaattaggtttttgggtttggatatttttttagtgagtttttagggtggagggatgggaaatggaagtttaggattttagtagggtgtttttttttgatttggggatatttgtttgtgggaggttgggtttatttttttttgttgatttgttttgggaggaagggatagggtttagtattgtttatttttttttttgttttttttagtagtttgagtttggttgggtgttttttgtttttttagtagtttatttgggtttttgggtagatagattaatagataggtgaggttgggttatggttggattattttaggattttgattgggggtttagtttatgattttgagtttgggagagatgaggttatgttttttagggtatttagtatgatttggtttagtggatgggattgggtagtttttttggtgtagggggttgttatgttaggatggggttattgattaggttaggtttttgttttatgatttgtggtggaaatgtttttttgtttttgtttttttgtattttttttgagatggagttttatttttgttgtttaggttggagtgtagtggtgtaattttgttttattgtaatttttattttttgggtttaagtaatttttttgttttagtttttgagtagttgggattataggtatttgttattatgtttggttaattttttgtatttttagtggagatgggggttttattatgttggttaggttgtttttaaattttttattttaggtgatttatttgtttttgttttttaaagtgttgggattataggtgtgagttattgtatttggttatgtgatgggaatgttttgtgtttataatagatgttgtatattgttggtttagtttttgaggttttttggatttttaggaattggtgtttttattaggaatttttaattttgatttggatttttagttgggatttggggtgttggagtggtaagagtgttgttaggtttggtgaagggtgtgagttgtttaatggggtagggaggaggtagggtttgttttgtagttggatagatagagttttttagttgttttttggaagattgaagggtaggtgatgttggagggagggagtgtaggtaggggttgtgagggagtttaggttagaaataggtggtgtttggatttaggttgtggtggttatggtggggatgaggggttgttttggattgtgttggggatgtggggtggtgtgttgttgtatgattattgttaggtttttttgtttttagtgtttgtatttagggttgggagggggttaaatgaattatattattggttttaggtttattaagtttggggaggtggttatttttttatgatggtatttggatgttttttgtgtgtggggagggtatagggattttatttgtagattatttttgggatagtgtgtttgtttttgaggttagatgttttgtattgggatagggtggagtggagggaaatttagtttggggtttattggaggggtttgttggtagatattgttttttgtgggaaattgattgtgggagaggggaattttaatttttgttattatattttttttttttgttgttatatttgttatttgttgttatagttatgagattttttaagggttattgttgttatttattgtatagtttggaagggagtttataggggatatatagtgagtaagagatttgtgttatttaggttttttgggggtgtttttagtgtagttatgatgataattatagttattatttattaagttttgtttatagtttaatttattttatttataatatttttagtagtaaggtaagtgaggtgttgttgttatttaggttggatagtttagtgatttgtttgaggttttatagtaggtgagtggtaagtttagtattagagtagggtaggttggtggtgttttttgagttttttttgttatgttgattatatgtatattttgggtttttgtaggaatgttttgttttttatttgttttgttttgtgtaaaattttttttgagttgtgtttgggagatatgttgagagaatttatggaaataaatgtgttattgatagtttttttgtttttaga

SEQ ID NO: 241 - DNA, 5286 bp, Artificial Sequence
  chemically treated genomic DNA (Homo sapiens)
tttggaggtaaagaggttgttagtaatatatttgtttttatgaatttttttagtatgttttttaggtatagtttaaagagggttttgtatggagtagggtaggtaggggatagggtatttttgtagaagtttaggatgtgtatgtggttagtatggtaaagggggtttagggggtattgttagtttgttttgttttgatgttggatttgttatttatttgttgtggggttttaggtaaattattgaattgtttagtttggatgatggtagtattttatttgttttgttgttgggagtgttgtgaatagagtaggttagattgtgggtagggtttggtgaatggtagttgtgattattattatggttgtattggggatatttttaggaggtttgagtggtataggttttttgtttattgtatgttttttgtggatttttttttaggttgtgtagtgagtggtagtagtgatttttgggaagttttatggttatggtagtaggtgataggtgtgataatagggaagagggatgtggtgatagaggttggggttttttttttttatagttagttttttataaagggtggtgtttgttagtaagtttttttaatgagttttaagttggatttttttttattttattttgttttagtgtagagtgtttgattttagaggtagatatattgttttagaggtggtttatgaatggagtttttgtgttttttttatatatagggaatatttaaatgttattatggaagggtggttatttttttaggtttggtgggtttggggttgatagtgtgatttatttgatttttttttagttttggatgtagatattaagagtagagagatttggtagtagttatgtagtagtgtattattttatatttttagtataatttaaagtagttttttatttttattgtgattattatagtttgaatttaggtgttatttgtttttgatttgaatttttttatagtttttgtttgtattttttttttttaatattatttgttttttagttttttagaaagtagttagagggttttgtttgtttaattgtagaataggttttgttttttttttgttttgttggatagtttatattttttattaggtttgatagtgtttttgttattttgatattttgggttttagttgggagtttgggttagggttaagggtttttgatagagatattgatttttggaggtttaaagagttttaggagttgggttagtaatatgtagtatttattatggatatagaatatttttattatatggttgggtgtagtggtttatatttataattttagtattttgggaggtagaggtaggtggattatttgaggtgaagagtttgagaatagtttggttaatatggtgaaatttttatttttattaaaaatataaaaaattagttaggtatggtggtaggtgtttgtaattttagttatttaggagttgaggtaggagaattgtttgaatttaggaggtggaggttgtagtgaggtaagattgtattattgtattttagtttgggtaataagagtgaaattttgttttaaaaaaaatgtaaaaaaataaaaataaaaggatatttttattataagttatggggtaggggtttggtttggttagtgattttgttttagtatgatagttttttgtattaaggaagttatttagttttgtttattgggttgggttatgttgagtgttttggagggtatggttttattttttttaggtttagggttatgagttgagtttttggttagggttttggggtggtttaattatgatttagttttgtttgtttgttaatttgtttatttaaaggtttaagtaggttgttggaggagtaggggatatttagttaggtttagattgttgggaagaatagggaggggagtaggtagtgttgggttttgttttttttttttagggtaggttagtaagggagggtgggtttagttttttataggtagatgtttttggattggaggaagatattttgttgaggttttgggtttttattttttatttttttattttaaaaatttattgaaagaatgtttaagtttagaggtttggtttttatttaaatagtgtgagagttgtatatattaggggaaattgaggttagaaagtaggttagttgttatggttggttttaaatttagatttttttttttgggattttgatgggtttatttgaggtttggggatagtgggggtttaggagagtattttttttttagaagatagttttgggttgtatttgttggggaggaagagatagatttgtttgtttgggaaagttttagttatagaattggttgggttttttgttattttttagagtggtttagagttatgtttgtggttttttgtagtattttttagggggtttttgaattgggattgggatttgggggtggttatttttgaggaggagtagaggtagggaaggagtaggagtggttagaggatttatgagtttatttagtttaagagattagttagggtgtgtttagtagttttggtggatagtgggaggtatttgtatagggtgtaggataggtaggttttttatggaggtttagtttggttgggaggatggggaagttgatgttatagtagtaaggaggtgtatagtgatttggtatggtgatttggtttgttattatgtgattaaagtttatgtagttttgggagggttttggatggtaggtgttatgagttggggaaagggtttttttttttttagatttagttttttttaaagggtgttgtttgtttatgagtttttttagtgagttttaggttggttttttttggttttttttgtttttgtttagaatatttgaatttatagttagtgttttagagatggttttggaggtggtggagtagtggtgtttttggtattagattagaatttagtttaaggggttttattatatgttgttgttaatgttaaaggtgtgttttgggaatatggtttggggttttgagtgtagattggttttgttgtttatttagaaatattagtattttaggtttaaggaattatttgaatagtttagaaaggtagggtttagagagggtttgagttggtttaagtttatagagtttagtagtgtaggtttggttatttggtaattgttttaagttattgtatgtttttgattagtttattaagaagtttgagttaggaatagttgtggatttagtttaggggattttggatagtgttgtttatttttttgtggtttttatttgttaaggatatgggttagagtttttttgagttatggtttttttttttgtttttgggtttgttgtgtttatggtgttggagagtttttgtagtttttatttgaggtttattttgtgtttataatatttattttataattatgtttttaggttgttttagttgatagaaggggatatgaaggttgatttaatattgttgtttgtttgggttatataggtttgttttgttatttattgtttttaaatgggttttggatagaatttattagatatataattgtgagatttttaatagttttagggtggaggtgttgtgattaagtttttttttaggttatttttttttgtgaagattagggtgattgggaagatgatagggtaggaattaaggttttatgatttgtttttgaaggttagatagttaataggaatattaggggatttggttttgttaagtggttgtattttatggtagttagttaggaggggtttaaagtggagagttatagggttttgttttttgttttggtttgtttagtagttttttttttgtttgagagtatataagatatgtatgtttttatttataggttggaattaaataatgagaatatttggatataggaaggggaatattatatattggggtttgttgtggggtgaggggaatggggagggatagtattaggagatatatttaatgtaaatgataagttaatgggtgtagtatattaatatggtatatgtatatatatgtaataaatttgtatgttgtgtatatgtattttagaatttaaagtataattttatatatataatattatatataatatatttatatgatatattatataaattatataaatataatatatgatatattatataaattatataaatataatatatgatatattatataaattatataaatataatatatgatatattatataaattatataaatataatatatgatatattatatgtaatatattatatataatattatatattatatataatatataatatatattatataatattatataatatataatatatattatatattatataatatataatatatattatatattatataatatataatatatattatataatatataatatataatatatattatatattatataatatataatatatattatataatattatataatatataatatatattatataatattatataatatataatatatattatataatattaaatatataatatatattatataatattaaatatataatatatattatataatattatatatataatatatattatataatattatatatataatatatattatataatattatatatataatatatattatataatattatataatatataatatatattatataatattatataatatataatatatattatataatattatataatatataatatatattatataatattatattatatataatatatattatatattgttatataatatataatatatattatataatattatataatatataatatatattataatattatataatatataatatatattatataatatataatatatattatataatatataatatatattatataatatataatatatattatataatatataatatatattatataatatataatatatattatataatatataatataatatatattatataatatataatataatatatattatatattatataatatattatatattatataatatataatataatatatattatatattatataatatattatatattatataatatataatataatatatattatataatatattttatatattatatattatatataatatataatatattatatattttatatatatatatgatatataggatttatagtagtaggtgggtagaaagaaagtttgagtgggtaaaggatg

SEQ ID NO: 242 - DNA, 5649 bp, Artificial Sequence
  chemically treated genomic DNA (Homo sapiens)
tggtggtttatatttgtaattttagtattttgggaggttgaggtaggtggattataaggttaggagattgagattattttggttaatatagtgaaattttgtttttattaaaaatataaaaaattagttgggtgtggtggtgggtgtttgtagttttagttattttggaggttgaggaaggagaatggtgtgaatttgggaggtggagtttgtagtgagttaagattgtgttattgtattttagtttgggtgatagagttagattttattttaaaaaaaaaaaaagaaaaaagaaaatattttaagttttgaggattatatagtttttgttgtaattatttatttgggttattgtagtataaaaataaatatagataatatatatatgagtgagtatggttggggtttaataaaattttatttatataagtaggtgatgaattatggtttatagtgttttaatttttgatttagatggtgaattattatgagtttttgttgttttttttggtagaaatatgggagaaattatagagagaaatagagattttaggaaaatagtaaaattaaataaataaagtgagatgttgttttttttggaggttgtaggttgtgttgaatttgtgtgtgtttgggtgtatagggatgtgagtagatgtgtgtggagatgtgtgtgtgggtggagattgagtgtggttggaggtggttgtggtaggatgttagaaggaaggagtttgtatttagtttttttattagtattttttggagttgttgaggggatgttattgttgaatattgattttggtgtaggttaaattgaagttagtttttgttattttttgttgggtgaggtattggggagaatagtgggattgaatggggtgggtttttttttttttatattttttttggaaatatttagtattagtatattagaatatggggagttattttttttagtgttgttttttaaggtttggaaggggaaattttgattttaagttttgtttgaagagtgatagtaaaggggagaggttggttgtggtttggtggtgtttattttttttttttgttttgaaattataggttggtatattatttgagagaatgattagtgttattaagggaagggtataagtttattggttttaggggagatattttaggggataggaatattttttgatgttgaatgagtgtagtatatagatggagaatatatataagagaaattatgaggatatgagagaaggtattggtaataggaagttataaaaagtaataaaaagaaagagtagatataaaaataataattgaagaaagttaataatagatgggatgaattatatgaggtatgtgatttatggatgaagaggtgagtgatgagattagttggggaatttttttttaggaaagataaattagaagaaatataaatgatattgaagtggttaggtgtagtggtttatgtttgtaattttagtattttgggagtttgaggtaggtggattatttgaggttaggagtttgagattagtttggttaatatgatgaaattttgtttttattaaaaatataaaaattagttaggtgtggtggtaggtatttgtgattttagttatttaggaggttgaggtaggagaattatttgaattaggaagtagagattgtagtgagttgagatggtgttagtgtattttagtttgggtagtagagtgatagtttgtttaaaaaaaaaaaaaggtagtaaagtgataggaggatagattagaagggttattttttagatagtgtaaggaagaaagaagaagaagaagaggaggaggaggaggaagaggaagaagatggagaagagggtattttagaagaaataatggagatatattttttaaaattgaagaaagatgattaattttagattgaaggttaagaggtaaattagagagatagtttggtaagttaggaagagtattaaagttagataattagagtgaaattaaagaaaatttaaggtgataaaaatttaaaaagtttttttgtgattttagtttattggtgaaaatttaaaaaaaaaaaaaaaaaaaaaaggatagtttgggtaatatggtgaaattttatttttataaaaaatataaaaattagttgggtgtggtggtatatgtttgtagttttagttatttgagaggttaagtaaggtaggaggattatttggggttaagagttttagattagttgtggtaatatatatgttgtgggaagttaggtattttgaatggagggattggttgaagttatggtagaagaatataaattgtgaagattttatggatatttattatttttttaattaatatttttgtgattttttatgtttgtttttaattttttaattttgttatttttgtaaattgaggatgtatgttgttttaggattttgtgatgattgtgttaattgtataaattgtttgtagaggataattgttgtgtgtttgagtaatgtgaaatttgggtattttaagaataggataatagtaatttttagggaataagggagataattttaaagtttggttgtttgtgggttgggtaggatagagttatattttttttattattgtaaataggtaagagaaatattgttgaattttttttttagtaaggaatattaataattaatagttttgagaaaagaatgtatttttagggttgggttattgaaatggtttttttgagagtgtttgtttttatttagaagtagaaagggatgaaatatgttttagttttttgtagtatttttagatttgataggattaggaaattttagtttggtaaattttagttagattggttttttgtttttgaattttgatagtgtgtgttagtgggatttggaagtttattagtgattttagttttgttgtgattttttgttttgtgattttttgttgtttttgaagtatgtgatttttgtgatttatattttgtttgtgtatttttttttttttgaaaattgttaataaaaatttgttggttttatggtttagggggtattatggaatttgtggatatgtgatgttttttttggatatttggttttaaaatgttttttttttgtattttttttttttattttttaggttagttgatatttagggaaaataggaaaggatttatgtgaaatattgggggttgaattttttttgataataagttttttaaaaaagatttttaaatgaaatttttttgttttttaatttttatttttgttttgggggtatatgtgaaggtttgttatataagtaaatttgtgtttttggtgtttgttgtatagaatattttattatttaggtattatgttgagtatttaatagtttttttttttgtttttttttttttttttattttgtattttggagttaattatagtgtttgttgtttttttgtttgtgttataagtttttattatttagtttttatttataagtgagaatatttagtatttggatttttgtttttgtattagtttgttaaggataatagtttttagttttatttatgttttataaaagatatgatttagttttttttaatggttgtattaaatgaagttttaaagatataatataaatattaattttttttttattataaaaattttttgttgaatttgattatatttaaattaatgagttttgttttatgaaagattttttggataaatttgatagttgatggaataggagaagttgtttgttatgtttaaagttaataagagattaatatttagaataaatggagatttgtaaattaatagaaagtaggtagtaaagttaaagaaaatagtttaaggtatagttattaaaaggaatgtgattatgttttttgtagggatatgggtggagttggaagttgttagttttagtaaatttatataggaatagaaaattagtgagattgtatggttttatttataagtgggagttgaataatgagaatatatggttatatggtggtgattaatatatattggtgtttgttgagtggggtgttggggagggagagtattaggaagaatagttaagggatattgggtttaatatttgggtgatgggatgatttgtatagtaaattattatggtgtatatatttatgtaataaatttgtatattttttatatgtattttagaattttaaataaaagttggatggttaggtgtggtggtttatgtttgtaattttagtatttttgggaagttgaggtgtgtagattatttaaggttaggagtttgagattagtttggttaatatggtgaaattttgtttttattaaaaatataaaaattagttagatgtggtatgttatttataattttatttatttgggaggttgaagtagaattgtttgaatttgagagtggaggttgtagtgagttgttgagattgtgttattgtattttagtttgggttatagtgtgagattatgttataaaataaaataaaataatataaaataaaataaaataaaataaaataaaataaaataaaataaaataaaataaaaaaataaaataaaataaaataaaataaaataaagtaatttttttttttttaagtggtttttattttttttttttgttttgtgaagtgggtgtgtaagttttgggattgtagtggttttagggaatttttttttgtgatgttttggtgtgttagtttgttgtgtatattttgttgtggttttttttttgttgtttgtttattttttaggttttgttgggatttgggaaagagggaaaggtttttttggttagttgtgtggtgattttggggattttagggtgtttttttgtggttgatgtttggggtgtagtggttgttggggttggggttggtgggagtttgtgggattttttagaagagtggttggtgttgtgatttagtattggggtggagtggggtgggattatttttataaggtttggaggttgtgaggttttgttggagttttgttgttgtagtttttgttattagtgagtatgtgtggtttgtgtttttggggatggggtttagagtttttagtatggggttaatttgtagtattaggtttgggtttttggtaggttttttgtttattttgagatttgggatgggggtttaggggatttaggatgtttttagtgttgttagtggtttttagggggtttggagtgttttggggagggatgggattttgggggtggggagggggggtagattgtgtttattgtgttttggtatttttttttgggttttagtaaatttttttttgtttgttgtagtgttgttttatattgtggtttattttttagtttgaggtaggagtatgtgtttggtagggaagggaggtaggggttggggttgtagtttatagttttttgtttatttggagagatttgaatttttttatttttttgttgtgtggtttttattttgggttttttttttgttttttgttttttttgttatgtttgttttttgttttagtgttgtgtgaaatttttggaggaatttgtttttttgttttttttttgtatttttgatttttttttgggttgttgtgaggtggagttggtttggtttttatattttgtatttttttttttttgtagt

SEQ ID NO: 243 - DNA, 5649 bp, Artificial Sequence
  chemically treated genomic DNA (Homo sapiens)
gttgtggggagggagaagtatgagatgtggggattgggttgattttgttttgtagtaatttggggaggggttaggagtgtagggagggaatagggaaataggtttttttgaagattttatataatattggggtggggagtaggtatggtgggagaggtggggaataggaaggaggtttggggtaaaagttatatgatggagggataagggggtttggatttttttgggtgggtgaggggttgtgggttgtagttttagtttttgttttttttttttgttagatatatgtttttattttgaattgggaaatagattatggtgtagggtggtattgtagtgaataaagaaaagtttgttggagtttgggggaggatgttaaggtgtggtgagtgtagtttgttttttttttttgtttttggggttttatttttttttgaggtgttttgggttttttgaaagttgttaatggtattggggatgttttgggttttttaggtttttgttttgggttttgaggtgggtgaggagtttgttgggagtttgggtttgatgttgtgggttggttttatgttgggagttttgagttttatttttggggatgtgggttgtgtgtatttattggtggtgaagattgtggtggtgaaattttagtgaagttttgtggtttttgagttttataagggtggttttgttttgttttgttttagtgttgagttatggtgttggttgtttttttggagggttttgtggatttttgttggttttagttttggtggttgttgtattttgggtgttggttgtagaggggtgttttggagtttttggagttgttgtgtagttggttggggaagttttttttttttttttaggttttagtggggtttagggagtaaatagatagtaggaagaggattgtagtgaagtgtgtgtagtgaattggtgtgttgggatattgtggggggaaattttttaagattgttgtgattttggagtttgtatatttgttttatagggtaggggagaggggtggaggttgtttagaggaaaggaaattgttttattttattttattttattttattttatttttttattttattttattttattttattttattttattttattttattttattttgtgttattttattttattttatgatgtagttttatgttgtggtttaggttggagtgtagtggtgtgattttggtggtttattgtaatttttgtttttgggtttaagtaattttgttttagttttttgagtaggtggaattataggtggtgtgttatatttggttgatttttgtatttttagtagagatggggttttattatgttggttgggttggttttgaatttttgattttaggtgatttgtatgttttggttttttaagagtgttgggattataggtgtgagttattatgtttggttgtttaatttttatttgaagttttggggtatatgtagaggatgtgtaggtttgttatataggtgtgtgtgttatgatggtttgttgtatagattattttattatttaggtattaagtttagtattttttagttattttttttggtattttttttttttagtattttgtttaataggtattagtgtgtgttgattgttgttatgtgattatgtgtttttattgtttagtttttatttataagtgagattatgtggttttgttggttttttgtttttgtgtgagtttgttgaggttaatggtttttagttttatttatgtttttgtaaaggatatgattatgttttttttagtggttgtgttttaggttattttttttggttttgttgtttattttttgttgatttgtagatttttatttattttagatattgattttttgttggttttagatatgatagatagttttttttattttattaattgttaagtttgtttaaggagttttttatgaaataaaatttgttaatttaagtgtaattaaatttagtaagggatttttgtggtggggaagaggttggtgtttatgttgtatttttaaaattttatttaatgtagttattaaaaagaattagattatgttttttgtgggatatggatggagttagaggttattatttttagtaaattaatgtaggaatagaaatttaaatattggatgtttttatttgtaagtgggagttaaatgatgagaatttataatataaataaggaaataatagatattgtggttgattttagggtgtaggatgggaggaaggagaggagtagaaaagagaattattgggtatttggtataatatttgggtgatgaaatattttgtataataaatattgaagatatgagtttatttatgtaataaatttttatatgtatttttaaaatagaaataaaagttaaaaaataaagaaattttatttaaaagttttttttaagagatttattattgggggaaatttagtttttaatattttatgtgggtttttttttattttttttaagtgttggttggtttgagaaataaagggaaagagtataaaagagagatattttaaagttgggtgtttaggggagatattatatgtttgtaggttttgtgatgttttttgagttgtaaaattagtgagtttttattagtaatttttaaagaggagggagtgtatgaatagggtgtgggttatagagattatatattttaagggtgataaaagattatagggtagaaggttatggtgaaattagaattattaatgaatttttaggttttattggtatgtattgttagggtttaagagtagagaattggtttgattagaatttgttaggttggaattttttaattttattaagtttgggggtgttgtaggagattagggtgtgttttatttttttttatttttgaataaaggtaggtatttttagggaggttattttagtggtttggttttgggaatgtattttttttttagggttgttaattattaatattttttattggggaaagaatttagtgatattttttttatttgtttgtggtaataagagaagtatggttttgttttgtttagtttataggtagttagattttaaggttattttttttgttttttgaaaattgttgttattttgtttttaagatgtttagattttatattgtttaaatatataataattgttttttataaataatttgtgtagttaatgtagttattatagggttttaaggtgatatatatttttagtttatgaagatgataggattaagagattaaagataggtataggaaattataagagtattgattggggaagtgataaatgtttatgaaatttttataatttatgtttttttgttatggttttagttagtttttttgtttggggtgtttgattttttataatatgtatgttgttgtagttggtttggaatttttggttttaagtgatttttttgttttatttagttttttgaatagttgggattataggtatgtgttattatatttagttaatttttgtattttttgtagagatggggttttattatgttgtttaggttgtttttttttttttttttttttttttaaatttttattaatggattgaggttataaggaagttttttaaatttttgttattttgggttttttttaattttattttaattgtttagttttggtgttttttttggtttgttaagttgtttttttggtttgttttttggtttttggtttgaggttggttatttttttttagttttgagaaatgtatttttattgttttttttgagatgtttttttttttgtttttttttttttttttttttttttttttttttttttttttttttttttttgtattatttggaaaatggtttttttaatttatttttttattattttattgtttttttttttttttagataggttgttattttattgtttaggttggagtgtattggtattattttagtttattgtaatttttgttttttggtttaagtgatttttttgttttagttttttgagtagttgggattataggtgtttgttattatatttggttaatttttgtatttttagtagagatagggttttattatgttggttaggttggttttaaatttttgattttaagtgatttatttgttttgggtttttaaagtgttgggattataggtgtgagttattgtgtttggttattttgatgttatttgtgttttttttggtttgttttttttgggagagagttttttagttgattttattatttatttttttatttatgagttgtatattttgtatgatttattttatttgttgttggttttttttgattattgtttttatatttattttttttttttgttgttttttgtaattttttattgttagtgtttttttttatgtttttatgattttttttgtgtgtattttttgtttgtgtgttgtatttatttagtgttaggggatgtttttgttttttgagatgttttttttggaattagtgagtttgtgttttttttttggtggtattggttatttttttgggtagtatgttagtttgtggttttaaagtaaaggaaggagataagtattattaaattatagttaattttttttttttgttattgttttttaaatagagtttgaggttagagtttttttttttgaattttgggaagtagtgttggggaaggtggttttttatgttttaatgtgttggtgttgggtgtttttaggggaagtgtgggagggagaaagtttgttttatttagttttattgttttttttagtgttttatttagtagagggtagtagaggttaattttggtttagtttgtattagggttagtgtttagtagtgatatttttttaataattttagagagtattaataaaggaattgaatgtaaattttttttttttggtattttattatagttatttttagttatgtttagtttttatttatatatatatttttatgtgtatttatttatatttttgtatatttagatatatataggtttaatatagtttgtagtttttaggaggggtgatgttttattttatttgtttaattttattgtttttttgaaatttttgtttttttttgtggttttttttatatttttattggagagggtaatgaaagtttatgatagtttattatttaaattaaggattgggatattatggattgtggtttattatttgtttgtgtaaataaagttttattgggttttagttatgtttatttatgtgtgtgttatttatgtttgtttttgtgttatagtggtttaaatgagtgattgtaatagagattatgtggtttttaaagtttaagatatttttttttttttttttttttttttgagatggagtttggttttgttgtttaggttggagtgtagtggtatgattttggtttattgtaagttttattttttgggtttatgttattttttttttttagtttttagagtagttgggattataggtgtttgttattatatttggttaattttttgtatttttagtagagatggggttttattgtgttagttaggatggttttgattttttgattttgtgatttgtttgttttagttttttaaagtgttgggattataggtgtgagttattg

SEQ ID NO: 244 - DNA, 1631 bp, Artificial Sequence
  chemically treated genomic DNA (Homo sapiens)
ggatttagaatatggggtggatttaggtagtggtgggaattaggtggatttgtttggattgaagtttttgttaggtattgaagttgtgaagttgtttgtgtagtaaagggagtttttggggggtgtttgagattttggtgttgtttgggggttgttggtagttgtgtttgttgttttttgtttggtgatttagttggtatttttggtggggttatgggggttagaggatagtgtggggggtggtgagtgtggttgttaagttttttaaggttttggagggataggatttgggtgtattttattggttgttatggtaatgtagtgttttagttttttgtgttttgtggtggagggaggtgtagttaattggaagtggtggagtttttggggatttttttttttttgttttatgttgtgtgtgggtgggggttaggaggtgtggggtggaggtggagtgtgggttgtggagatttggtgtttgtaggaggtttggtgtgtggtggggttgtatggggttatttttggagtagtattgtgagtagtggtgtgatagtgtggggtttttttttttttagaagagatgttatttatataaatttgatttttatgtggggtgtgggattttgtggggttttagttgtaggtgtttttgttgttttttttgggtgggtgggttggagaagaagtttatgtgggattttttaaaatggtgtatagggggattttagggttttatggttatttttttggattttttggaggtgttgtttagttatttttagttgttttgatgatttgttgtgggtttttttaggagatttgaaagtttagggtgggttgtgtgggtaatatttttgtttaggtttttggagggttttatgtggttgtttttggagtattttagagtgttagggttgtgggaaggggtgggtgtgtttttggaaatatgagtgtttgttagtattagtgtttggatagggttggggataaattagtttatgttgtgtatattgaatttatgtgtttgagtgagggtgggtgtgttggggagtgtgtttaagtggatagtgttgtatagtaatgtttatggggagttttaggagagtttggttatttttgtgtaggataattttttttttattatttgagttttgtgtttgtgggtaggatttttttgaattggggttgtgtgtttagaaatatgtatatgggagtgtttagtttaaagttttagggtttttgggatttgtgtgtttggggttggggttttaggtgggtataggtgggagggtgaatttgtgggtagggtgggtttttttttgtgggtttagtatttgtgtgtttttagtttaggtgtgtgggaggaaggtagtggtttgttgtgtagagttttgtgtgtttgtgaggtggtgttatagttgtagtagtgtttgttggtttgggttgttttagataagagtgtgtggaaagtgtggtggggttgagatgtgattaggatgtggggaggatggattagtaggatagattgattgggggtttggtgggtggagggtagtgtagttatgttttttttggatttgttgttagttgggtttggggtttttgatatgttttttaggtgggtttttgag

SEQ ID NO: 245 - DNA, 1631 bp, Artificial Sequence
  chemically treated genomic DNA (Homo sapiens)
tttgaggatttatttggggggtatgttgaaagttttgggtttggttgatggtggatttaggggggatgtggttgtgttgttttttgtttgttgggtttttggttggtttgttttgttggtttgttttttttgtgttttggttgtgttttagttttgttgtgttttttgtatatttttatttggagtggtttgggttggtgggtgttgttgtggttatggtgttattttgtgggtgtgtagggttttgtgtggtaggttgttgttttttttttgtgtatttgagttggaggtgtatagatgttgagtttgtggggaggggtttattttatttgtaggtttgtttttttatttgtatttatttgggattttgattttggatatgtgagttttagaaattttggggttttgagttgagtgtttttatgtatgtatttttaggtatatagttttagtttggaaaagttttgtttgtgagtatgggatttgggtggtgggggagaggttattttgtgtaggagtagttgagtttttttggaattttttgtagatattattgtatggtattgtttatttggatgtattttttaatatatttatttttatttaggtgtatggatttggtgtgtgtggtataaattgatttgtttttagttttatttaggtattgatattaataggtgtttatgtttttagaagtatatttgtttttttttgtagttttagtgttttgggatattttaggggtagttatgtagggttttttgggaatttgggtagaggtgttatttatatagtttgttttgaatttttgggttttttaaaggaatttatgatgagttattagggtgattggaagtggttggatagtgtttttggggggtttaaagaagtaattatggggttttagaatttttttgtatgttgttttgaagaattttgtgtggattttttttttaatttatttgtttgaaggaaataataggggtgtttgtggttgggattttgtaaggttttgtgttttatgtgaaggttaggtttgtgtgggtgatgttttttttgggagaaaggggattttgtattgttgtgttgttgtttgtagtattattttggaagtggttttgtgtagttttgttgtgtattaagttttttgtgaatgttggatttttgtggtttatgttttgtttttgttttgtattttttgatttttgtttatatatggtgtggagtgggggggggggggtttttgagaattttgttgtttttgattggttgtgtttttttttattgtggagtgtgaggggttggggtgttgtgttattatggtaattggtgaggtgtgtttagattttgtttttttgaggttttggagagtttagtaattgtgtttgttgttttttgtgttgttttttggtttttatggttttgttagaggtattggttgagttattgggtgaggggtagtgggtgtggttattagtggtttttgagtgatattaaggttttgggtgttttttggaggttttttttgttgtgtaggtgattttatggttttggtgtttggtggaggttttggtttaaatgagtttgtttgatttttgttgttgtttgagtttgttttatgttttggattt

SEQ ID NO: 246 - DNA, 6680 bp, Artificial Sequence
  chemically treated genomic DNA (Homo sapiens)
tttataagtttgtttgtgtatatatgaagaaatttttggatatataggaaattgattaatagagattatggtgggggagtggttggtagagaatttggaagataaggagggttttttatattttatttttaaattatgtgaatgtgttatttatttaaagtgttatatgagagtttttgattagaggttatattttttagtttgtaagaatggttattttataggttgtaaatttttatgagaaataaagtttttttttttaaatttatgaatagattaattagtttaaggaatattttattgattttaaattggatttttttggtttagtgattgaagattgatatagtttgattgttttggaagttttttgggttattatggatgttgagttttgggtaatttttatagtggaggataggaatgttaggtttttgagtttaagttaagttattatatttttagtgatttgtatgtatatattaagatggtttgaagtaattgaagatttatagaagtgaaaatagttttaattgatgatattttattattgtgatttgtttttgttttattttaattgattaatgtattttgtaattttttttatttttaagaaggttttttataatgttatttatttttaagaagtttttttgtaattttttttatttttgagaatgtattttgtgagatttattttttgtttttaaaatattgtttttaattttattgtttattttaaaatttataagaattaatgataattttattattttttgttgattttttttttggatttagtttgtttgtatttaggtgaaataaatagttttgttgtttaaaaaaataaaaataaaaataaaaataaaaaataaagtgttaaatgaattgaatttaattttatgggaagagttaatttagtaattataatttttattaaagggtgaaagtttaatagttatttatttatttaataatttatagtaggttaggtattgtggtttatgtttgtaatttttgtattttgggaggttgaggtaggtggattatttgaggttaggagtttgagattagtttgattaatgtgatgaaattttatttttattaaaaatataaaaaattagttgggtatggtggtgtatatttgtaattttagttatttaggaggttgaggtgggagaattgtttgaatttgggaggtggaggttgtagtgagttgagattgtattattgtattgtagtttgggtaataaaagtaaaattttgttttaaaaaataaaaataaaataatttatagtaattaggaaatatttttagtaatgatatttaataagtgtatagtattttaaatgtgttaggtattgtgttgtttttatttatattattttatttaatttttattatttttagagtgtaagtgtttaatattatagaagagatagaagattatagaaggatgagagaggttgttttttttttttttttttgtgagatggagttttgttgtgttgtttaggttggaaggtagtggtgtgaatttggtttattgtaatttttattttttaggtttatgttatttttttgttttagttttgtgtgtagttgggattataggtgtttgttattatgtttggttaattttttgtatttttagtagagatggggttttattgtgttagttaggatggttttgattttttgattttgtgatttgtttgttttagttttttaaagtgttgggattagaggtgtgagttagtgtgtttggttaagaggttgtttttttttaaagttttttgtaaatatttaggtgttattattttgggttaggtttgaggatgggtattgtattagggatattaagataaagatagtattttgttttttaggatttaatggtttagtgagggagattgatgtgtaaaatagtagatttatagataggttttgaatagagaagggagtgttagagtatagtgtttgaggattaggagataaagggaatagagagattggggataataagtaaattttttttatgatattttttggttgaggataggttttgaaagtagttgtggaatttggaggtgttatgtgggagataaattttgtagttttaagtttaataatgaataaaggttgttgggttttttggtaggagaggagatttgataatggtttggtttgttgtttgattagtgtagatattttttttagattttgaagtttgaagtgtttttttttagttgtttatatagattaaataagttggatgattgttttatttttattttgttgtgtggttttatagttatagttagttttataataatttaattaaattatttgagtagaagtaaaaataatttttatgggtaaagatagatagttttaagatgtgaatattaattttttgttgttattttagaagagagtggattttgaagtttgttttaggaagtttttgagaagggtgattttgtttttttttaaggtgaagtggtaaaattgttgtttttttttatagttgaaagttttttttattttaaggtttatataggatatttataaaagttgataataatgagttgtgatttggtttttgggaaggtagttttattttaaagaataaggattagattgggtgtggtggtttatgtttgtaattttagtattttgggaggttgagataagaggattgtttgaatttaggagtttgaggttaatttgggtaatatagtgagattttgttttaattttttttaagttaaataataataataataataataataataataataataataataataataaaaggataggaattttattttaaaagtatttttttatttaaaggtttattttaggggaaattttaatttagtttttttagtttttaagtagttgtgaggagtttggaatattgttatagattggtagaattaggtattttttaataaatttagaagttaagtggtattgttaaaaaagattaaaaatgaatatgagttttaatatttatgttttttgttatggtttttatggaaatagatatttgttttagggagaaagaaaatgtggggggaagtagtgtaagtgtttttaaattattagtgttttgaaagatttattttttttttttgttataatattaatagttaggaatgtgagatttttgtgtggtaatttattgtatttaaaaaaatgtattaaatgagtgggatttttttttgtgaatttttagattaaatataaagattttaagataaaaagtttgtttagtgggtaaggattttttgggtttgggttttttgtttatttgtgttgtttgtttatttgttgtttttttgaggggttttatgtttatttttttttaatttttttaatgatgtttgagattttgtttagaaaaatgatagatggaagtatttagttattttgaagttaagtttggtttgagaagaagttttttaaggtttagtatttgaattatttttggttttgtttataggttaagtgaaaattattttgattggtttgggggggaggttgattttatataagggtgattgttggaaaaaatgttgtaataagtatattttaggtaatagtgtattgttaattgtttgttttgtgtagtgtgttgttgtttgtatgatttagtttttattgttttgggtattttttagttgtattttatttttggtatatttttggtgattaattaggtatgagagtttttttaaattaggattgttgttttaggaaggttggttatatttgttttttgatttggggagatgtagtttattaataaaataaagatattttttttgtttagttaagattttaaagtaggtgttttggtgtattgattattaattgaggatatggttttggttagagaatgggaggaggtggggattatgtttattttatttattttttttttttttttgtgagagaaagggttagttattttaaggtatggttagattaattttttttgtgtttttgttgaggttttgagttatttaggttagggagaatagtgattttgtggttttttttttgatttttaaaaagaatttagtgttgttttggggagtatgtgttttgagaataaaagtaatatttaattgtaatttgtgtagtttagaatggttattgtttttttttttttattatttgtagaaggtttggaagaatagatggagtttgtatttaagttgagtggttttgttagattaaaggtgattaaattttagagttttatgtttttttgtataggtttttggttattggtttgggaatttgaggatgttggtaagaatgtatatagtgagggaagggttatgtttgtgatttgtgggttgagtggattagaaattatgatgatgttataatatgggtgatatgttggtgttggtgtagggtgttgggggtagggggttttgtaggggtgtggagtggtattgtgttgttataggggtttgggtgttttaggtatttatgtgggtggtgtattagaaggggtattgttttgtttgagtgttgtttttggggtgaggtgggtatgtggttttataaggtggagtttaggtggttaaagtttggaaaggtagggaaggatttttttgttttttgtttgttttgttttgtttttgtttttgagaatggggagttggtttggatttagtttggggtttattgttatgtttttttttatggtgagattatttttttagttttaggtttatatttggggatgttttttaggtgttttgtaatttttggtattgtttttttgttttttgggataggattatattttttgaggtgttttggggttttggggggtggtgttttatgtgggttgtggggggtgggggtggtatgtgttgttgtttttggttaatgtggagttttgtgtggaggttatgtgtttttgtttggtgtttttgtgtgtgtttgggtttgttggtgtttagagtgtggttaggtggtttggattgagtaggtgggtgtggggtttggaggaggtggtggttggttgaggttagtaagagggatgtggttggtgggaggggttgggttgtggtagtgattttttgttgtagggtggtgggtggggttgtgggttttggaggggttggtgggtgggggttgttttgttttgtgtgtggtttgggtggagttttgtttttgtttttgttttttgggggtgtggttgtttgtgggtagggggttgggtgattattgggtgtttgttttggggtgttgttgaggagataatagggggtgtgggtttttgtttattttttttttttttttttttttttgtgggttttgttgggttttttattgtttgaagggatggggtggtgttttagggattagtggttttaggattaaattgtgggtagttagggttgtgattttttttgtgattgttttttggtgattgtagttggtgattgaggggtggtgtttttgggttttatgagggtttttttgtttttgtggttggatgtgtggatagtgtgggtggtggtaggttgggtatggggatggtgggaggtggtggtgagtttattgtgggattatttgggggtttgtttttggggtttgttttatttgttgaattgtgaagggggtggtggtggtggtttggaggtgtttttggtgggagttggggggggtgtttgtgtagggggagttaggtaggggtggagttatttggattggattgttagttttgtttattttttttttttttatgtgtgtgggttttggggtgttgagtttggggagatttgaaaaggtgtggggaggaagggggtggggttaggggttggagtgtaaggtgtgttttgattggttgggggtgattggtttttttttttttgtttggattagggttatgtttattttgggtttggtgttgtgtttaattttttgttttttttaaattttgttgttgtttttgattttaatttttagtttttgggaatttgttattttatgtttttggtattagttggtgtttataaaagttataatgttaaaaagattaataagagatatagtattttttatgatataatggtagtaaatataagttaaaatttagaggtttataaatattttgtttgttgttgggtaaggaagtttaaatttgagggataataggagtttaatattattggttattattagtttgggtgtttttttatttattatgttagatatagataaagtaggggtgggtattttatttgtataatgagttgtaggtagtattaagatggttttgggggtattgttgagttgaatttggaatatttttttatagttttggtgaaatgttaaagagtttatgggggaaaaattttttatttttgtgattttgtttgattttaaaaatttaagagttttatgattgagaaagtttagttaatttgattttttggaattaatattatatttaggttatattttttaatgtttatttagtagattttgataattttttttgtggttaatttagatgtttttattttatgtatttttttgatgatgtatgtagatgtgatgtgagatttttttgggttgatgatatatagaaaggtaaagaaagtgattgtatgtttttgaaaattatttttagg

SEQ ID NO: 247 - DNA, 6680 bp, Artificial Sequence
  chemically treated genomic DNA (Homo sapiens)
tttgaaaatgatttttaaaaatatgtaattattttttttgtttttttatatgttattaatttaaaaaaattttatattatatttatatatattgttagaaaaatatgtggaataaagatgtttaaattaattatgaaaaaaattattaaaatttattaaataaatattgggaaatatgatttgaatatgatattggttttagaaaattaagttaattgagtttttttggttataaaatttttggatttttaaaattagataaagttataagggtgaagaattttttttttataaattttttaatattttattgaaattgtaagaagatattttagatttaatttaatagtgtttttggagttattttaatattgtttataatttattgtgtaaatgaaatatttatttttgttttgtttgtgtttgatgtggtggataagaaaatgtttaagttaatagtaattaataatgttgaatttttattgttttttaggtttaagtttttttgtttaatagtaagtaaaatgtttatgaatttttagattttgatttatatttgttgttgttatgttatgaaaaatgttgtattttttgttgatttttttaatattatgatttttgtagatgttagttagtattaaaaatgtaggatgataggtttttaaaagttaggaattaaaattagaggtagtgataagatttaagaaaagtagagaattagatgtagtattggatttaggatgggtgtggttttggtttgggtgaggaaaagaggattggttgtttttggttaattagagtatgttttgtgttttggtttttggttttgttttttttttttttgtgtttttttgaatttttttgaatttaatattttggagtttgtgtgtgtgggaaggggaggggtgggtggggttaatggtttaatttgggtaattttgtttttgtttgattttttttgtgtggatgttttttttaatttttgttaaaaatatttttaggttgttgttattattttttttatagtttagtgggtggggtaggttttgggaataggtttttgggtggttttgtggtgagtttgttattgttttttgttgtttttatgtttaatttgttgttatttatgttgtttgtgtgtttggttgtgaagatagaagaatttttgtggggtttgggagtgttgttttttaattattagttgtggttgttaggggatggttgtagggagggttgtggttttggttgtttgtagtttggttttaaagttgttggtttttggggtattgttttgtttttttagataatggggaatttggtggggtttgtagggaagggagggagggagggaggtaaatgagggtttatgttttttattgtttttttgatggtattttggagtggatgtttggtgattgtttagttttttgtttatgaatagttgtgtttttggagagtggggataaaggtgaggttttgtttgagttatatataaagtggagtgatttttgtttattaatttttttgaggtttgtagttttgtttgttgttttgtagtagggggttgttgttatggtttagttttttttgttgattgtgttttttttgttggttttagttagttgttgttttttttgagttttgtatttatttgtttagtttgagttgtttgattatattttgagtattaatagatttgggtgtgtataaaagtgttaaatagaggtatgtgatttttgtgtggggttttgtattggttgagagtggtggtatgtgttgtttttgttttttataatttgtgtggagtgttgttttttgggattttgaagtattttgggaagtgtagttttgttttggagggtaggaggataatgttgggggttgtagggtgtttggggagtatttttaggtgtgggtttgggattaggggggtggttttgttgtggaagagggtgtggtagtggattttggattaggtttgaattagttttttatttttgagaataagggtagggtggagtaggtggagggtgggggggtttttttttatttttttaaattttggttgtttggattttattttgtagagttatatgtttgttttgttttaagggtagtatttggatagagtagtgttttttttagtgtgttatttatatgggtgtttaagatgtttgagtttttgtgatagtataatgttattttatgtttttgtagggttttttgtttttggtattttatattgatattggtgtgttatttatattgtgatattattgtaatttttaatttatttagtttataggttgtgggtgtggttttttttttattgtgtgtgtttttgttagtatttttaggtttttgagttggtgattagggatttgtgtgggaaagtgtggggttttggaatttgattgtttttggtttaataaagttatttagtttaaatgtagattttatttgtttttttaagttttttgtggatgataggggaggaagagtaatagttgttttagattatatagattgtagttaagtgttgtttttgtttttagagtatgtgttttttagagtagtattgggttttttttaaaaattgaaaaaggagttataaggttattgttttttttgatttggatagtttagaattttagtaaaggtataaaggaaattggtttgattgtgttttagaataattggtttttttttttataaaaaggggaaaaaaataaatgaaatgaatatggtttttgtttttttttattttttgattaagattgtgtttttggttggtggttaatatattaagatatttgttttgagattttgattaagtagaagagatatttttattttattaatgagttgtatttttttaaattaagaaataaatgtgattaatttttttgaaataatagttttaatttagaaagatttttatgtttagttagttattagggatgtgttagagataaaatataattaaggggtgtttaagataataaaaattggattatataagtagtagtatattatataaagtaaataattagtaatgtgttgttgtttgaaatatgtttgttgtggtattttttttaataattgtttttgtgtggggttggttttttttttaagttaattgaagtggtttttatttagtttgtgagtaggattaggaataatttagatattgagttttgaaaggtttttttttagattaaatttagttttaaaatggttaggtgtttttgtttgttatttttttgaatagaattttagatattattagaaaagttggagaaggatgggtatgagattttttaggaaagtgatagataggtaggtaatataaatgagtaaggaatttaagtttaagaggtttttatttattgaataggttttttattttgaagtttttgtatttgatttggaggtttatagaggaaggttttatttatttaatgtatttttttaagtataataaattgttatataaaagttttatatttttgattattaatgttgtgatagaaaaaagaaataaattttttaaaatattgataatttgaaagtatttatattgtttttttttatattttttttttttttagagtagatgtttatttttatggaaattatagtaaggaatgtagatgttagaatttatgtttatttttaattttttttagtaatgttatttggtttttgggtttgttgggagatgtttggttttgttagtttgtgataatgttttaagttttttatagttgtttgaggattgagagggttgggttaaagttttttttagaatgagtttttgaataaaaaggtgtttttgaggtgggatttttgtttttttattattattattattattattattattattattattattattattatttgatttaaaaaaaattgagatagggttttattatgttgtttaggttggttttgaatttttgggtttaagtaatttttttgttttagttttttaaagtgttgggattataggtatgagttattatatttagtttgatttttgttttttagggtggggttgtttttttaagagttagattatagtttattattgttagtttttgtgggtgttttatataagttttggaataggaagggtttttaattgtaaggagagataatagttttgttattttattttggagaggggtagaattgttttttttgaaagttttttaaaatgaattttaagatttatttttttttgaagtggtagtaaggagttaatgtttatattttggaattgtttatttttgtttataagaattatttttgtttttgtttagatggtttggttggattgttatggagttggttgtgattatggagttatataatgaagtggagatagggtagttatttagtttatttgatttgtgtagatagttaaaggagagtattttaggttttaaagtttagaaggaatgtttatattgattaaatggtgggttaggttgttgttagatttttttttttgttagagagtttggtagtttttgtttattgttgggtttgaggttgtagggtttgttttttatatggtgtttttaagttttatagttgtttttgaggtttgtttttggttaaagggtgttgtgggagaggtttgtttgttgtttttggtttttttgttttttttgttttttaatttttaagtattatgttttaatatttttttttttatttaaaatttgtttatgagtttgttgttttatatattgattttttttattagattattaggttttagagggtagggtgttgtttttgttttggtatttttagtgtagtgtttatttttaggtttggtttaggatgatggtgtttgaatgtttgtagagaattttgggaaagaataattttttggttgggtatgttggtttatatttttaattttagtattttgggaggttgaggtaggtggattataaggttaggagattgagattattttggttaatatgatgaaattttgtttttattaaaaatataaaaaattagttaggtatggtggtgggtgtttgtagttttagttatgtatgaggttgaggtaggagaatggtatgaatttgggaggtggaggttgtagtgagttgagtttatgttattgttttttagtttgggtgatatagtaagattttgttttataaaaaaaaaaaaaaagaataattttttttatttttttgtgattttttgttttttttgtgatattagatatttgtattttgggagtggtgaggattaaatgaaataatgtaaatgaaaatagtataatgtttggtatatttaaagtgttgtgtatttgttaggtattattgttagagatgttttttgattgttatagattattttatttttattttttgagatggagttttgtttttgttgtttaggttgtagtgtagtggtgtaattttagtttattgtaatttttgttttttaggtttaagtgatttttttgttttagttttttgagtagttgggattataggtgtgtgttattatgtttagttaattttttgtatttttagtagagatggggttttattatgttgattaggttggttttaaatttttgattttaggtgatttatttgttttggttttttaaagtgtagggattataggtgtgagttgtggtgtttggtttgttataggttattgaatgagtgaatgattattagatttttattttttgatggaaattgtagttattgggttaattttttttatggggttaaatttaatttatttaatattttattttttatttttatttttatttttatttttttgagtaataaggttgtttattttatttggatgtaggtgggttgagtttgaaaagagagttagtaaagggtggtgggattattattggtttttataggttttgggataggtagtagagttaagagtaatgttttgggggtaggggatggattttataaagtatatttttaagggtggggagaattataaagaaattttttaagggtgggtgatattataaagaatttttttaagggtgggggagattataaagtatattgattagttaaggtggggtagaaataaattataatggtggaatgttattagttaaggttatttttatttttgtggatttttagttgttttaggttattttgatatatatgtgtaggttattggggatatgatggtttagtttgggtttagaggtttgatatttttgttttttattgtaagagttatttgaagtttggtgtttatgatggtttagggggtttttgaggtgattgggttgtgttagtttttagttgttaagttgagaagatttaatttaaaattagtgagatgttttttgggttggttggtttgtttataaatttggaaaggagagttttattttttataaagatttgtagtttatagggtggttatttttataggttgggaaatgtagtttttggttagaagtttttatgtaatattttaaataggtaatatatttatatggtttaaaaataaagtataagaagttttttttattttttaagttttttattaattatttttttattataatttttgttaattagttttttgtgtatttaggagtttttttatgtgtatataagtaaatttgtagg

SEQ ID NO: 248 - DNA, 16842 bp, Artificial Sequence
  chemically treated genomic DNA (Homo sapiens)
ttttttaaagtgttgggattataggtgtgagttattgtatttggtttgttatttatgtatttatttttttttgagataagtttttgttatgttgtttaggttggttttaaatttttaggtttaagagatttttttaaagttttgggattataggtgtgagttattgtgtataattttgaagtggttaattttaataatatatttattttagtttaatatatttaaaattatattattttaatatgtaattattattaaaattattaatgagatattttattttatttttatttatttatttttttgagatggagttttgttttgttttttaggttggagtgtggtggtgtgattttggtttattgtaagttttgttttttgggtttatgttttttttttgttttagttttttgagtagttgggattataggtgtttgttattatgtttagttaatttttgtatttttagtagagattaggttttattatgttggttaggatggttttgaatttttgattttgtgattagtttattttggttttttaaagtgttgggattataggtgtgagttattgtgtttggttagtgagatattttatttgtgttttttttttttttttttgagattgagttttattgtgttgtttaggttgtagtgtagtggtataattttggtttattgtaatttttgttttttaggtttaagtgatttttttattttagttttttgagtagttgggattataggtgggtgttatgatatttggttagtttttgtatttttagtagagatgggggttttattatgttgtttaggttggttttgaatttttgattttaggtgattatttgttttggttttttaaagtgttgggattataggtaaaagttgttatattaggtttattttttttttttttgagatggagttttattgttgtttaaggtggagtgtaatggtaagattttagttttttgtaatttttgttttttgggtttaagtgatttttttgttttagttttttaagtagttgagattatgggtgtttgttattatgtttggttaatttttgtatttttagtagagatagggttttattatgttggttagattggttttaaatttttgattttgggtgatttatttgttttggttttttaaagtgttgggattataggtgtgaattattgtgtttggtaggtttatttttaatttttttaattttggaaatttagtgtgtagggtaggtatggtgttttatgtttgtaattttagaattttgggaggttgaggtaggtggattatttgaggttaggagtttgggattagtttgaataatatggtgaaattttgtttttattgaaaatttaaaaattatttagttatggtggtgtatgtttgtagttttagttattttagaggttgagataggagaattgtttgaatttgggaagtagaggttgtagtgaattaagattatgttattgtattttagtttgggtaatagagtgagattttgttttaaaaaaaaaaaaagagagttagtgtggagggaagtgtttttgttgggtttgggtgttttgtgggattttgaggaaaagtttgtattaggtagatgttgttttgtttttatgggtaaaggatattttaataaattgaggagtaaaatgtttttgtatgttttttttgtgtagatttgttaggaagagtataagaagaaatatttggatttttttgttaattttgtggaattttttaagaagtgtttggagagatggaagattatgtttgtaaaggagaagtgaagtttgaagagaaggtaaaaagtgataaagtttgttgtgatagggagattaaaaattatatttttttgaaatgtaagaaagggtaagaaaggaaagaaaaaggattgtaatgtttttagaaggttattatttgttttttttttgttttgttttgaatattgtttaaagattaaaagtggatatttaggtttatttgttgtggaaattgtaaagaaattgggtgaaatgtggtttgggtagttagttaaagataaataattatatgagtagaaagtagttaagttataggagagatatgaaaagggtattgttgtatattgtgttaagggtaaaagtgaagtaggaaagaagggtttaaagaagaataaattagaagatgaggaggaggaggaggagaaagaagatgaagatgaggaggaagagggtgaagatgaagaataaatggttattttttaatgatgtttgtgtagtgggtttgttttgttaagaatgtgaattttagtatagtttagtattagttttagtataaaattgtataaatttttgtatagtttataagattttttgtatagaaaatattttttttttttttttttttttttgagatagagttttgtttttgttgtttaggttggagtgtaatggtgtgattttggtttattgtaatttttgttttttgggttttggtttaagtagtttttttgttttagttttttgagtagttgggattataggtatatgttattatgtttagttaatttttgtatttttagtagagatggggttttattatgttggttaggttgtttttaaatttttgattttgtgatttgtttgttttggttttttaaaatattgggattataggtgtgagttattgtattttgtttaatgtttttaaatatttaatggtttttaaaaaatttattgtgtatggtagtatagtatatttgtaggaattagtattaatagtatattttgtgttttttaagatgttgtattttttaatattttgtaataaaattatgtgtattaaaaaaataaagaaattttgtgtgtagtttatatttatagtatatttttgtttaggtatttgagagaatgattaggaggggtttttggaggaggtggtttttgaatggagaatttatttttaaggattttgtttgtaatggttattaagtattttttgagttatttttatgtgttttgtagttttttgaaggggtgtgggatttattgatgttaattatttagtattatttttagattttaagaagttggggtgtgagttagtaattagtatagaaaagagatattaaaataagtttgagttggggagtgtttttttaattttagttttttggaagagattttttttttttttttgagatagagttttgtttttattgtttaagttggagtgtagtggtatgattttggtttattgtaattttttttttttgggtttaagtgattttttttttttagttttttgagtagttgggattatagatatgtatttgtaatttttattaaaaatataaaaattagttgggtgtggtggtgtatgtttgtaattttagttattggggaggttgaggtaggagaattgtttgaaattaggaggtggagattgtattaagatagtttgttttagttaaataatttggtgttagtgtaggaaaaggtggaaggtatggggttagtataggagggtttaatatttttaattttattaagttatattttggtaatttttgttttttatgagaagtttttgttgggtttgttttagtgttgttttgaggttttttttatgagttttgatagggtagaggttgttttgagtgttttttttttttttggtttaagagtggtttaaaagaaggatttttgattggaattggttattttgtgttattttttgatttttgattttgttttaaagggggatgtgggggaggggttttggtaggggtggttttgttttttttaggtttgtaagtttaggtttttgtttattgggtttagtttattttgtggttgtttagggaggttgttggtatttgtgatttatgattttttttttgagttttattgaggttatagttgtggttttgtttttttatgtttgttttttgttttttgtttgtgatgggtgtttttgaggattaatgagtgtgttgtatttattttttgggtggggttaagtgttgattaattgttgtttgggtgtttggttgggtttaaatgttttaattgttagtggtggtggggtgggtagagggttggggatggtaggtttaattaatgggtgggtatgttgtttttgtgaggaggtgtgttttgtggttgggtgtgtggtgtttgtggtggtgtagggagggggagggaggtaaataagatggtggtggtgtgttgggtgtggaagggggaggtggtttggggtgtttgtgagtgaggtgtggggtggtgaagggagtgtgggtggtggtatttgttgttgtggttttggatgggttgggttttttttgttgttttgttttttttatatgtgtggtggttgtggtgagggggatgtgttgtttggggtttggtatttttgggaattttttggtttggagtttgtggtttgtgttgttttggttgttgggagttttgtggagtttttgttgttgtgttgttttgtggattggatgttgagggtatttggggtggggtgtgtgtttgggtagatgtttgtggggaggggggtgtttgttgggttttggtgattattttgggggttgtgggttggtttggggggtgtttagtgtgggtttttgtgggtgttgggtagtgattagttttgagtggagttgttggttgtggtgggaggttttttggatgtttttagttttttgaatgtttgtttgggttggtgggagttggtgttttttgggaggtttgtttggttgtttgtggtggagtgtttgtttttgggataggtggtgggattggggtgttgttggagatgtttttagtgaagttgggttttttaggtgtgggggttttggggggtagtgatgttgtggatttggtttgtgggatgggtggtttggagaagattgtgtttggttgtgtttatatttgtttgtgggtttgaggtttttggaggatgatttagtattgaaaagttttggttggtttttttagggtttttgaggatgaagttgattttgattgggttgttttttagttttgaggtttgggttttattggaatttgtgtttgagttgttgttttggatttttggtgtttgttggtttgtagattttgtattgggtttggatttgtagttgggattgatgtgtagaataattgtttttgttggaagaagggttttttttttttttttggggtttttgttgtttttttttttttttttttttttgtaaaattttggagaagggaagttggaatataaggaaggattgtttatttgtggatttagggttggtggtgggattttaggattttgggtttagtatggaggtggtggatttgtagtagttgggtatgtttatggagggtgagttgatgttggtgggtatggatatgtttatttattgtattgattttattgaggttatttattagttgtgttgtaagtgggttaagtttattggtaagtatttgatgggggatttgttgggggaaggtttttatggtaaggtgaaggaggtgttggatttggagatgttgtgtaggagggttgttaagatttttaagaagaagaagttgtgaaggatttttaatggggaggttaatgtgaagaagtaagtatggtttgttggggttggggttgggttgggttagttatggtgttgatggttttgttttttttttttttttttttttttttttttttatttttttttaatattttgagttggatttgtttggtgtttgtgttttttgtgttagggagagtgtggttgggggtttgtgttatggatttttatttaggtaaggttagttgttgtagtggggtgtgtgtttgtatgggtttttggattttagttaaaatgttttggtagtgaaatttttttgagaagggagtggtttttaattttttaagattagttttttggtttttttagttgtttaaggagtagaggtgtttagtggaattagtttgtgtttgtttgggttttgagagtttgtgtgtggttgttaatatgttttttgtgtagtgtgtggttgttattggggttaggtgaaatgtgatttgtttattttgttagaggggaattttgggttgttaaaaataattgtttgtattggtttattagttagtaggagggaaatgtagtttttttttatttgttagggatgtgatgttggaagtatttttggtttttggggttggaagttttgtttgagggggattgtgttttttttttgaattgtatttggaagattttatttttttaattgatttttttaggtatggggttgttgttgggtattttggatgtttttgtatttgtgtgtggagaagtttttatttagggtagtattggttggtttgagttttttttagttggtgggggtggttgggggtgtttttgttttattgtagttagatatgttgtatttgttgttgtttggtgggttttgtttaggttttgttttttttttagtttttttaatttttaaaattttgttttttgtttttaagaaaggattttatttgttgggttaggttttgagggattggtaaggatattttgtgtagggtattatgattttggaaggaggtttggggaggggttgttgtggtgtttgtttttattttttttttgtttaggggttttggggtttttgttgtgtttgtttttattttttttttgtttaggggttttggggtttatgtatatttttttttttttttttttgagatggagttttgttttgttttttaggttggagtgtagtggtgtgaattgggtttattgtaagttttgttttttgggtttatgttatttttttgttttagttttttgagtagttgggattataggtatttgttattatgtttggttaattttttgtattttttagtagagatggggttttattgtgttagttaggatggttttaattttttgattttgtgatttgtttgttttggttttttaaagtgttggtattataggtgtgagttaatgtgtgtggtttttttttttttttttttttttttttttgagatggagttttatttttgttgtttaggttggagtgtagtggagtggttttggtttattgtaatttttgttttttgggtttaagtgatttttgtgttttagttttttgagtagttgggattataggtgtttgttatagtgtttagttaattttttttttttttttttagtagagatggggttttattattttggttaggttggttttgaatttttgattttgtgatttatttgttttagttttttaaagtgttgggattaaaggtgtgagttattgtgtttggttagtatgttttttaattagtatgtaggttgtgatatgtggaaattaggggtataggttttgaagtttgtattttggagttggagtagttagggttaaatgggagtggttgggaagggtgtgtttttatgaggtttttttgatgttttagtgtttagtttggatttgggtagaaggtgtggttagtgttttgagttagtggagtagttgtttgtgtttggtttttgtgagatgggttggttaggggttaggtagagtttgtgtttggtttttgtgagatgggttggttaggggttaggtagagtttgtgttgggggtagtaggtgttttttaaaggggttagtgatagttttttttttagtagtgagaaatttatgtttaggggttgggtgtggtggtttatgtttgtaattttagtattttgggaggttgaggtgggtggattgtttgaggttaggagtttgagattagtttggttaatatggtgaaattttatttttattaaaaatataaaagttagttgagtgtggtggtgtgtgtttgtaattttagttatttgggaggttgaggtagaatattgttggagtttgggaggtggagtttgtggtgatttgagattgtattattgtgttttagtttgggtgatatagtgagattttgttttaaaaataaataaataaataaataaataaataaataaataaataaatttggtttgagttttgataaatgtatatgtagggttaatgggaagatagatgttggagggtggaagtttgattgtgagagtgagttttttgtttttttgaatagttagtggaggaggttttgggagtttaggtgagtatttgaatggtagggtagagtttgagggttttggtggagataggtaagaaggttgtaggaatttagtttggtttagtgtttgggagaatgggagggaatatggaggtagggaggtagaggggttggtaggatttggattggattgtgtgttgtagttatttatagtttgattttattgttttgaagtgagtgatgtatttttattagtgtttagtgtttaattttattttggttttgagtgtgtaatggttttgtttttgtggggttttttgggatgaggggtgagttttgtttttttttggttattgtttgttattaggagttgttttgtttatagttgtgatttaggagttattgtattttttttagttttttgggtgttgttagggggtttttttattttgggagttggtgtgttttgattggaggttgttatgtgtagagtgttgttaaggagaaggggtgtttattgtttagttttgaggtttaaggttttggttagttttgttgttagtgttgtagggaaaaagttttttttgtgtgtgggaagtttaataaattttgtttagattgtgttttgtagtgagtgtttggaattttttagataagttttaggtgtttggttttttagttggtgtggaaagtgtgggtgattattaaggggggtgggttggggtagatggagttggtgtgagttttgttttttttttttttttttagaaaggtagttttggagtttatgttttgttttgtttttattggtaaaaagtataattttattagaaataggaaagttttaaaaagtattaatgagttaaaaagagggttgggtatgtttggttatgtttgtaattttagtattttgggaggttaaggtgggtggattatttgaggttgggagttagtttgattaatatggtgaaattttgtttttattaaaaatataaaattagttgagtgtggtggtgtatgtttgtaattttagttattttggaggttgaggtaggagaattatttgaatttgggaagtagaggttgtggtgagttaagattatgttattgtattttagtttgggtaataagagtgaaattttgttttgaaaaaaaaaagggttggggttgggtgtggtggtttatgtttgtaattttagtattttgggaggttgaggtggtttgattataaggttagaagtttgagattagtgtggttaatatggtgaaattttttttttattaaaaatagaaaaattagttaggtgtggtggtatatgttaataattttagttattttatttgaggttaggagtttaagattagtttggttaatatggtgaaattttgtttttattataaatataaaaattagttaggtgtggtggtgtgtgtttgtagtttagttattggggaagttgaagtaaggagaattgtttgaatttgggaggtggaggttgtggtgagttgagattgtattattgtattttaggttgggtaagtttaggagagaagagtgaaattgtgttttaaaaaaataattaattaaaataaaattagtgttataggttgtttttggtaggtagtgggtttttagggtggagtagggaagggttggaaagggttgtttgtgtttagtttgattttttgtgttttttgggggatagtatggttagttgttgttgtggagtttatagtggggttttgggggggggggtgtaggtagaaggttgttatgtttttttttttttttttattttagtgagagtgggtttgaaggtagggagtttgtttgttttgtggagtttttgtagaggtatttagggttgttgtgagtgtatagtttggtggtgttttatggttttgtttttttttgttatttttatttgttgtaaaatattgtgtttttgtattttttttttttatttgtttggaaatgtgaaaattattgttgttgtaggaaatgggtttagatttgggttgtggtttttttatttgtattgtttttgtggtgtttagttaggaggtgggaggtgggtggtatttagtgtgtttggttgtggtgatgattggtagatgtttggatttatggtaaagaggatttttgtgagttgggagttagttttggattttgtaggtttttatattttaggtggtttttatggggttttagtatttgttgaggtttttgtgttagttatgtgaggtttgggtgtttttgaggtttttgtttgtgtttttttttgggtagtgggagggagagttttgagatttagagggagtttaggggttgggtagttgtagaatagtgggggtaatgggtttattgggggttttgggttgtgtatatagtgggtttttggtgtttagttagttggggtaggtttggaatgttggttttttttttaggatttggggtgttgttgtagttgttggggaattagtgaggtggttggatggtttgtatattttataaatgttattgtattgtttaaattggatttaatttttttaatatttttttttttttttttttttttttttttggagatagggttttattgtattgttgaggttggagtgtagtggtgtaattatagttttgggtttaggtgatttttttgtttttaaggtagttgggattgtagatgtgtattattatatttgattagttttttgtagagatggggttttgttatgttgtttaggttggttttaaatttttagatttaagttatttgtttgtttgggttttttagagtgttgggattataggtatgagttattgttttgttatgtttatttttatttatttatttatttatttttgagatggagttttgttttgttttttaggttggagtgttgtggtatgattttggtttattgtaagttttgttttagttttttaagtaagttggaattataggtgtttgttattaagtttggttaattttgtttttgtatttttagtagagatggggttttattgtgttagttagtatggttttgattttttgattttgtgatttgtttgttttggttttttaaagttttgggattataggtttgagttattgtgtttggtttatttttttattttttattttatagagataagggtttgttgtgttgtttaggttggttttgaatttttgattttaagtaattttttttggttttttaaagtgttgggattataggtgtaagttatagtattgggtttaaagtttattttttttttttttttttttttttttgagatggagttttgttttgttatttaggttggagtgtagtggtgtgattttggtttattgtaagttttgttttttgggtttatattatttttttgttttagttttttgaatagttgggattataggtgtttgttattatgtttggttaatttttttgtatttttagtagagatggggttttattgtgttagttaggatggttttgattttttgattttgtgatttgtttgttttggttttttaaagtgttggggttataggtgtgagttattgtatttggtaaagtttatttttttaaagtgtgtaatttagtggtatatagtatattgatagagttgtataattattatttttattagtttttagaatatttttgttattttagaaggaaattttgtttttgttagttattattttttattttttttttagttttggtatttatgtattttttttttgtttttggattggtttgttttgaatattttatatgagtggtgttatatattgtgtggttttttgtgtttggtttgttttatggagtgtgttgtttttaaggggtatttgtgttgtggtttgggtttgaatttttttgttgtttatggttgtgttattttttagtgtgtggagggttatgttgtgtttgattgtttatttgtggttggatatttgggttgtttttgtttttgtttgtgaattgtggttgttttggtgtatgtgtgtttagttggtgtttttttagaatttttgagggttttgttttagttatattaggagggatttagggattagggtatgtgggtttggagttgggtgtttttgggtttttatgtgttttttagttttgttttgagttgtgggaggttggggtgagggttaggtttattttttttttgtatgatttgtttttaggtagatggaggtttttagttttatttttttgtgagtttgagtggtgtttatgatttttttttttattttttgttttgttaattaataagttagttaaatagtttatgttgtttgggtaagtttagtaggtttttaatgtggtattttggagtggttggtgatgttttaagagttgggttttttttttttggaggttttttttgttttttgttaagtttttaggttttgttgggtttttttttttgttttttttttggttggagatgttagaggaagtttggtgatttagagaagttgatgtgtatttattattttggaggtgattgttattaggtgggggtggttttatttttattttttttttggtataaattgggggatgtatgtgtttgtgtagaatgttttggttttttttaattaaatagataatttagtgttttttggtttatgttgatttgtttaggagtgtttgggtttttttatgttttagttgttgtgtgttttgttgttgtgaagtgtttttgttgaggtggaggtagggtagggtgtttttggtgagggtgagtttttttgtgtttgtttttttatttgtagaatgatggtttatggaggagatatggtgttggtaggtggtggttggtgtagggaggtttttaggagggagttttttatttttatttgtttttagggttgtgtagttttttgagtggtttttatgaggttttgaggttgtatgtaggttgagtttttggttttattgtttttttttagggttaggattgtgttggagtttgggtgggtgtggggtggtttttgtataggtagtaggaggtgggttagagtggtgttggatttgaaggtttgtggtttttttagttttattgaggaggttggaatagtgttttgggttattttttttgttggtagttggtttttgttgagggagggggtgtttttgttttttggtggagtattaggtttttggggtttgtgtgtttgagtatttggtttttgttgtttgaaaatagtattttttttgttttttggttattgtattttttttgaatagaaggtaagttttgttttttaggaatggtttgtgatttttattagtgggggaggttaggggtatatagagttttggggaataaggggatttggggttgagttgggttttttgggtttattttgagtttttttgagtagtttggtaggtaggaaggtgttgggttttggggtttttgttgagtttagttttatttttagtgttttttttaatgttttgggtgtttgttaggttgtggatataggttttggttagttttataaataattttgttgggttttgttgggaattggtgttattattatatagtttagagagaatggaaatatagggttttttagtgagtagattaggtttgtggtgattagtggaagtgggggatgtttttagggttgggtagtttgatagggtattgggtatagttaggggttggaattagttgtttattggttttgtttttgggggattgtgtttttttgtgttttgtttttattatattttgttttttttttattttgtttttttagtttttttttagattggtggttttttgtttaggtttagttttagtatagtttgtagttttggtagagtttaggttttggttttttgaggttgttttgagggtagtgagtaatgagttttgggattggtgtattgggagggaaaggtgagttaaggttttttgtaagaggtagttttgagttgggggtggggaaggttgggttgtgggatatttttgatattttaagttttttttttgagatggagttttgttttgttatttaggttggagtgtagtggtgagattttgattttttgtaatttttgttttttaggtttaagtgatttttttgttttagttttttgagtagttgggattataggtgtttattattatgtttggttaatttttgtatttttagtagagataaggttttattatgttggttaggttggttttgaatttttgattttaggtgatttattttggttttttatagtgttgggattataggtgtgagttattgtgtttggttttttagttgttttttatgttttatgtttgggttttttgttaagaattaaaaaagaaaaaaaaaattatggagatggaatttatatattgtataatttatttgtttatagtgtataatttagtggtattaagtatatttatatggttgtgtaattattatttttaattttagaatgtttggttattttaaaagtaagttttatttttattgtgttattttttattttttttattagtttttggttattttgaatttattttttggttttggattggtttgttttggatattgtatagaaatgggattttgttggttgggtgtggtgatttatgagagtaagagatttagattattttggttaatatggtgaaattttatttttattaaaaatataaaaattagttgggtgtggttgtgggtatttgtagttttagtgatttaggggttgagttaggagaaattgtttgaatttgggaggtagaggttgtagtgagttgagattatgttattgtattttggtttggtgatagagtgagattttgtttttaaaaaaaaaaaaataagaaatgggattttgttattttagtgttttttgaggttgaggtgggtagatgatttgagtttagtagtttaaatgagattagtttgggtagtatggtgaaattgtttttattaaaatataaaaattagttgggtatggtagtatatgtttgtagttttagttatttgtggggttgagatgggaggattgtttgagtttgggaggtgtattttagtttgggtgatagggaaattttgttttaaaaaaaaaaaaaaaagtgtattatatattgtgtgttttttagtgttttattgtgatatttttaaggtgtagttaggttgtggtttgagttagagttttattggtttttgtggttgagttttgttgagtgtgtggatgggttgtgttgatttttgtttgtggaagggtttttgggtggttttatattttggttgttgtgtgttttgttgttgtgagtattttgtgttttgtttttgtgtggtgtgtattgttttttagggtgtgtatttgggagtggagttgttggtttatagggtaatagatttttggagaagttgtagatgtttttatgtttatttattgggtgtgaggattttgttttttgttatttttgtttttgtttaatttttttttttatgagatagggttttattttgttgtttaggttggagtgtagtagtatgattataggtaattataggtttaagtgatttttttatttgagttttttgagtagttaggatttgaggtatgtatttttatatttggttaatttttgtatttttagtagagatagggttttgttgtgttgtttaggttggttttgaatttttgagtttaggtgatttatttgttttggttttttatagtgttgggagaaatgaagtgtttgtgatagggtggtagttgtagagggggttgtgttttttggtttgttgtgttttatttttgtgataggtaggtgggtgtggttaattgggtggtagttgtagagggggtagtgataggtgggtgggtgtggtaggattttataatgtttttttttgtggtgtttttttttttgtttgtttttttttatgggttatttttttagtttatttgtggtttattttttaaggagtgggatttttggagttgggagtttttggttgtgtgggattgtattgtgtgatggagttattattagggttttaatttattttggtttttgttatagtttgggttttatttgtgttattattgtagtagtttggtttttaggaagtaaaattgttattgagttataaagtttaattaagagtgttttttgggaggttgaggtgggtggattataaggttaggagattgagattattttggttaatatggtgaaattttgtttgtattaaaatataaaaaaattagttggttgtggtgatatgtgtttgtagttttagttatttgggaggttgaggtagggaaattatttgaatttgggaggtagaggttgtagtgagttgagattgggttattgtgttttagtttagggatagagtaagattttgttttagaaaaaaaaaaaagtgttttaattgtgttttttaaagtttttgttggttgatgatagattagagggtgttgtgtttttattttttattgttttgagtttggatgtgtggtttttgtagggtttttttttatagtattgtgaatttatagtttttttttagggaagggaggaggtatgttatttttatagggagatggggaggttgattttagggatttaggttattattttgatgttgggttggttgatatatttttgttttttttgttttagg

SEQ ID NO: 249 - DNA, 16842 bp, Artificial Sequence
  chemically treated genomic DNA (Homo sapiens)
tttgggatagagaggataggggtgtattagttgatttaatgttaggatgatggtttggatttttggagttggtttttttatttttttgtggaagtggtgtatttttttttttttttagagagaagttgtgagtttatagtgttgtgggaaagggttttgtaggggttatgtgtttaggtttagggtggtagggggtgggagtatagtgttttttagtttgttattggttggtgagggttttggaggatatagttaggatatttttttttttttttgagatagagttttgttttgtttttaggttggagtatggtggtttgattttagtttattgtaatttttgttttttaggtttaagtgatttttttgttttagttttttgagtagttgggattataggtatgtgttattatagttggttaatttttttgtattttagtatagatagggttttattatgttggttaggatggttttgattttttgattttgtgatttgtttgttttggttttttaaaggatatttttaattgagttttgtaatttagtaatagttttgttttttagaaattagattattgtaatggtagtatagatggagtttagattgtggtaggagttagggtgagttggagttttggtgatggttttgttatatagtatagttttatgtagttaagggtttttaattttgagggttttattttttggagggtgggttgtaggtgagttggaaggatggtttataggaaggggtaggtgaagaaggagatgttatagaaagagatattgtggggttttgttatatttatttgtttgttattgttttttttgtagttgttgtttagttggttatgtttatttgtttgttataagggtggggtataataggttagagagtatagttttttttgtagttgttgttttgttgtagatattttattttttttagtattataggaggttgaggtgggtggattatttgagtttaggagtttgagattagtttgagtaatatggtgaaattttgtttttattaaaaatataaaaattagttaggtgtggaggtatgtgttttaagttttagttatttgggaggtttaggtgggaggattatttgagtttgtagttatttgtgattgtgttattgtattttagtttggataatagaataagattttgttttataaaagaaaaaattaaataaaaataaaaatgatgaggagtaaggtttttatatttagtgggtgggtgtggaagtgtttgtagtttttttaaaggtttgttattttgtgagttagtagttttatttttaggtatatattttgaggaatagtatatgttatgtagaaatggagtatgagatgtttatagtagtaggatgtatagtagttgagatgtggaattatttaggggtttttttatagatgaggattagtatagtttatttatgtatttaataagatttagttataaaaattagtgaggttttgatttgagttatagtttagttgtattttgaggatgttatagtgagatattaaaggatatatagtgtgtgatgtatttttttttttttttttgagatagggtttttttgttgtttaggttggagtgtattttttaggtttaagtgatttttttattttagttttgtaagtagttgggattatagatgtgtgttattatgtttagttaatttttgtattttagtagagatagttttattgtgttgtttaggttggttttgtttgaattattaggtttaagttatttgtttattttggttttggaaaatgttgggatgataggattttattttttgtttttttttttttggagatggagttttattttgttgttaggttagagtgtaatggtatgattttagtttattgtaatttttgttttttgggtttaagtgattttttttgatttagtttttgagttgttgggattataggtgtttgtaattatgtttagttaatttttgtatttttagtagagatggggttttattatgttggttaggatggtttggattttttgtttttgtgagttattgtgtttggttgataggattttatttttatgtaatatttaggataagttaatttagagttaggaagtggatttagagtggttaggagttggtggaggggatggagagtgatataatgggaatggggtttgtttttggggtgattgaatgttttggaattagaagtagtggttgtatagttgtgtgaatgtatttaatgttattgaattgtatattgtgaatgaatgagttgtatagtatgtaaattttatttttatagtttttttttttttttttaatttttaataggaagtttaagtatggagtataaaaaatagttggggggttaggtgtggtgatttatgtttgtaattttgatattatgggaggttgaggtggattatttgaggttaggagtttgaaattagtttggttaatatggtgaaattttgtttttattaaaaatataaaaattagttgggtgtggtgatgggtgtttgtaattttagttatttaggaggttgaggtaggagaattgtttgaatttgggaggtggaggttgtagagagttgagattttattattgtattttagtttgggtgatagagtaagattttattttaaaaaaaaaatttggggtgttaggggtattttatgatttagttttttttatttttagtttagggttgttttttgtaggaagttttggtttattttttttttttagtgtattagttttagggtttattgtttattgtttttagggtaattttagaaggttaaggtttgagttttgttagggttgtaggttgtgttggggttgggtttggataaggggttgttagtttggggaggggttaggagagtaggatgaagggaaagtaaggtgtgatggggatggggtatagagggatatagttttttagaagtggagttagtgagtaattggttttggtttttggttgtgtttggtgttttgttgggttgtttagttttgaaagtgttttttatttttattggttattgtaggtttggtttgtttgttgagaagttttgtgtttttgttttttttgggttatgtggtggtggtattaatttttagtagggtttggtaaggttatttatagaattggttagggtttgtgtttatagtttggtaggtatttagggtattgagggggatgttgagggtgaggttgggtttggtaaaggttttggggtttagtgtttttttgtttgttaggttgtttaggagagtttggggtgggtttgagaggtttggtttagttttagatttttttgttttttagggttttgtgtgtttttaattttttttgttgatgaaggttataggttatttttgggaggtaagatttgttttttatttagaggagatgtggtggttggggggtggggaaggtgttgtttttagatagtagaggttagatgtttggatgtataggttttaagagtttgatgttttattaggaggtgaaagtatttttttttttagtaggagttggttattggtagggaaggtggtttaggatattattttagtttttttagtggagttgagggagttatgggtttttaggtttagtattgttttggtttattttttgttgtttgtgtagggattattttatatttatttaggttttagtatagttttaattttgaggaggggtagtgaggttaggagtttaatttgtatgtagttttagagttttgtgggggttgtttgggaggttgtatggttttaaaagtaaatgagggtggaggatttttttttggaaatttttttgtgttggttattatttgttgatattatgttttttttatgagttattattttatagatggggaaatgggtataggaggatttgtttttattgaaggtgttttgttttgtttttattttaatggggatattttatagtagtaggatatatagtagttgaaatgtggaagagtttaggtatttttgagtaggttagtatagattaagggatattgggttgtttgtttaattaaaagggattaaggtattttgtgtaggtatgtgtgttttttgatttatgttaggggaggagtgggggtggagttatttttgtttggtggtagttatttttgggatgatgggtgtatattagtttttttagattgttaggttttttttgatgtttttagttagaaaaagagtagaagaggaggtttagtgaaatttaagagtttggtgaggaataggaagagtttttaggagggggaagtttggtttttggggtattgttagttgttttgaggtgttatgttaggggtttattgggtttgtttaggtagtatggattgtttagttgatttgttgattagtaggataggaaataggaaggagagttataaatgttatttaagtttatagagaggtggggttaggagtttttgtttgtttagaaatagattatatagggaagagatgggtttggtttttgttttggttttttatggtttagagtaggattgggaggtatatggagatttaggaatatttagttttagatttgtgtgttttggtttttgaattttttttgatgtggttgaaataaggtttttaaggattttagagggatgttggttgagtatatgtgtattaaagtagttataatttataggtagaggtgggagtagtttaagtgtttagttatagatgagtagttaaatgtagtgtggttttttatatattggaaagtgatgtagttgtgaatagtagagaggtttggatttaggttatggtgtggatgttttttgaggatagtatattttgtgagataagttggatgtaaaaggttatgtggtgtgtgatattatttgtgtgaaatgtttaggataggttaatttagaggtaggaagggaatgtgtgggtgttgggattggggagggaatggggagtgatggttgatagagatggggtttttttttggggtaataagaatgttttggaagttgatagaggtgatagttgtgtaattttgttaatgtattatatgttattgaattatatattttaaaaaggtgaattttgttgggtgtggtggtttatatttgtaattttagtattttgggaggttgaggtaggtagattatgaggttaggagattgagattattttggttaatatagtgaaattttatttttattaaaaatataaaaaaattagttgggtatggtggtaggtgtttgtagttttagttatttgggaggttgaggtaggagaatggtgtgaatttgggaggtagagtttgtagtgagttaagattatgttattgtattttagtttgggtgatagagtgagattttattttaaaaaaaaaaaaaaaaaaaaaaaaggtgaattttaggtttagtattatggtttatatttgtaattttagtattttgggaggttagagaggattatttaaggttaggggtttaagattagtttgggtaatatagtaagtttttgtttttataaaataaaaaataaaaaggtgggttgggtatagtgatttaagtttgtaattttaggattttgggaggttgaggtgggtggattataaggttaggagattgagattatattggttaatatggtgaaattttgtttttattaaaaatataaaaataaaattagttaggtttggtggtaggtatttgtagttttagtttatttgggaggttgaagtggagtttgtagtgagttaagattgtgttatagtattttagtttgggggatagagtgagattttgttttaaaaataaataaataagtaaataaaggtgaatgtggtgaagtagtggtttatatttgtaattttagtattttgggaggtttaggtaggtggatagtttgagtttaggagtttgagattagtttggataatatggtgaaattttatttttataaaaaattagttgggtgtggtggtgtatatttgtagttttagttattttgggggtaggagggttatttgagtttagagttatgattgtgttattgtattttagttttggtgatatagtgagattttgtttttaaaaaaaaaaaaaaaaaaaaaaaaaaaggtgttaagaaaattgagtttagtttgagtaatatggtggtgtttgtgggatatatgggttgtttagttgttttattgattttttgatagttatagtagtgttttagattttgagagaggaattaatattttaggtttgttttagttggttgggtattggaagtttattgtgtgtatagtttagaatttttagtggatttattatttttgttgttttgtggttgtttagtttttgagttttttttgggttttagagtttttttttttgttgtttagagaggggtataaatagaggttttgaggatatttaggttttatatggttggtgtaggggttttagtagatgttggaattttataaaggttgtttgggatgtaaagatttataaagtttaggattgatttttagtttgtgaaaattttttttattataggtttaagtatttgttaattattgttgtaattaggtatattgagtgttgtttattttttattttttggttggatattgtgggggtggtgtggatgggagagttatagtttggatttgggtttgttttttatggtagtagtgatttttatatttttaaataggtagaaagaaaagatatgaaagtatagtgttttgtaataggtggaagtgataggaaagggtagggttgtgggatattgttaggttgtgtgtttatggtagttttgggtgtttttgtggaggttttataaggtgggtagattttttgtttttgagtttatttttattggggtggaaagggggagggaggtatggtggttttttgtttgtatttttttttttagaattttattgtgggttttgtagtagtagttagttgtgttgttttttgagaagtatggggagttgggttgggtataggtgattttttttagtttttttttgttttattttaggaatttattgtttattagaaatagtttatggtattgattttattttaattaattgtttttttgagatataattttgttttttttttttaggtttgtttagtttggaatgtaatgatgtgattttggtttattgtaatttttgttttttaggtttaagtgattttttttgttttagtttttttagtagttggattataggtgtgtgttattatgtttggttaatttttgtatttgtagtagagatggagttttgttatattggttaggttggttttgaatttttgattttagatgaagtagttgggattattggtatgtgttattatatttggttagtttttttatttttagtagagagagggttttattatgttggttatgttggttttaaatttttgattttgtgattaaattgttttggttttttaaagtgttgggattataggtgtgagttattatgtttggttttagttttttttttttttgagatggagttttatttttgttatttaggttggagtgtaatggtatggttttggtttattgtaatttttgttttttgggtttaagtgatttttttgttttagtttttagagtagttgggattataggtgtgtgttattatatttagttaattttgtatttttagtagagatagggttttattatgttggttaggttaatttttaattttgggtgatttatttgttttggttttttaaagtgttgggattataggtatgattgaatatgtttagttttttttttaatttattgatgttttttggaatttttttatttttaataagattatattttttgttggtgagagtgggataaggtatggattttagggttgtttttttgggaaggaagggaagagatgggatttatgttggttttatttgttttaatttattttttttggtgattgtttatgttttttatattaattggaggattggatgtttgaggtttgtttggaaggttttagatatttgttgtgagatataatttgagtggagtttattaaattttttatatataaaggaggttttttttttgtagtgttggtagtaaggttggttaaggttttgggttttagggttgggtagtggatattttttttttttgatagtattttgtatatggtagtttttagttagaatatattagtttttagaataggaggattttttggtagtatttagggggttggaggaaatgtagtggtttttgaattatagttgtaagtggggtagtttttgatggtagatagtgattaggaagggatagggtttattttttattttagggggttttgtaagggtaaagttgttatatatttagggttaggatgaaattggatgttgaatattagtgagggtgtattatttattttaaggtagtggggttaagttgtgggtagttgtgatgtatagtttagtttaggttttgttaatttttttgtttttttgtttttgtgtttttttttgtttttttaggtattgggttagattaggtttttgtaatttttttgtttgtttttattaagatttttaggttttgttttattgtttaggtgtttatttgagtttttaggattttttttattgattgtttaggaaagtagggggtttatttttatagttaggtttttattttttagtgtttgtttttttattgattttgtatatatatttgttaaaatttaagttagatttatttatttatttatttatttatttatttatttatttatttttgagatagagttttgttgtgttgtttaggttggagtgtaatggtgtgattttgggttattgtaagttttgttttttaggttttagtaatgttttgttttagttttttgagtagttgggattataggtatatgttattatatttggttaatttttgtatttttagtagagatggggttttattatgttggttaggttggttttgaatttttgattttaggtgatttatttattttagttttttaaagtgttgggattataggtgtgagttattgtgtttggtttttaagtgtgggttttttattgttgggagagagattgttattggtttttttagagggtatttgttatttttagtataggttttgtttagtttttgattaatttattttatagagattaggtataggttttgtttagtttttgattaatttattttatagagattaggtataggtaattgttttattgatttaaggtattggttatattttttatttgggtttagattgggtattgagatattagaaaggttttgtggaaatatattttttttagttgtttttatttaattttgattgttttagttttagagtataaattttagagtttgtgtttttggtttttgtatgttatagtttgtatgttgattaagaagtgtgttggttgggtgtggtggtttatgtttttaattttagtattttgggaggttgaggtaggtggattatgaggttagaagtttaagattaatttggttaagatggtgaaattttgtttttattaaaaaaaaaaaaaaaaaattagttgggtattgtggtaggtatttgtaattttagttatttgggaggttgaggtatgagaattatttgaatttagggggtggagattgtagtgagttaagattattttattgtattttagtttgagtaataagagtgaaattttgttttaaaaaaaaaaaaaaaaaaaaaaaaaaaggttgtatgtgttgatttatgtttgtagtattagtattttgggaggttgaggtgggtggattatgaggttaggagattgagattattttggttaatatggtgaaattttgtttttattgaaaaatataaaaaattggttgggtgtggtggtgggtgtttgtagttttagttatttgggaggttgaggtaggagaatggtatgaatttgggaggtggagtttgtagtgagtttagtttgtgttattgtattttagtttggggaatagagtgagattttgttttaaaaaaaaaaaaaaaaaaatgtatgtgagttttagggtttttgagtaggagagaggtgagagtagatatggtaggagttttagggtttttgagtaggaggaaggtgagagtagatattgtagtagtttttttttggatttttttttaaggttatggtgttttgtgtagggtgtttttgttagttttttgaggtttagtttagtagataaggtttttttttggaaataggaggtaaagttttgaaagttaagaaggttgggaaaggagtagggtttgggtagggtttgttaggtggtggtaggtgtagtgtgtttggttgtgataaggtagggatatttttggttatttttattagttgggagaggtttaggttggttagtgttgttttaggtaggagtttttttgtgtatagatgtagaggtgtttgggatgtttagtggtagttttgtgtttgaagaagttagttggaaaagtaaggttttttggatgtaatttgggagggaggtatagttttttttgggtagggtttttagttttgggggttagggatgtttttagtgttatatttttggtaaatgaggaaaggttatgttttttttttgttgattgataagttggtgtaaatagttatttttggtagtttagggtttttttttgataggataaataaattatattttgtttggttttggtaatggttatatattgtgtagaaaatgtgttggtggttgtatataaatttttggggtttaaataaatataggttgattttattgggtgtttttgttttttggatagttgggggagttaaggggttagttttaggggattgggggttgttttttttttaggagggttttgttattagggtattttaattggagtttaagagtttatgtaaatgtatgttttgttgtgataattggttttgtttgagtgaaagtttgtaatgtaggtttttaattatgttttttttggtatggaggatataggtgttagatgggtttagtttagggtgttaagaggaagtaagggagggagggaggagagaaggaaggaagatagaattattagtattgtgattggtttggtttggttttgattttagtaagttatatttatttttttatgttggtttttttgttggggattttttgtaattttttttttttgaggattttgatggtttttttgtatagtgtttttgagtttagtattttttttattttgttgtaagagtttttttttagtaggttttttattaggtatttgttgatgagtttggtttgtttgtggtgtggttggtagatgattttggtggagttgatgtggtggatgaatgtgtttatatttattgatattagtttgttttttgtgaatatgtttagttgttgtgggtttattatttttatgttggatttagggttttggagttttgttgttagttttgagtttgtgggtgagtggtttttttttgtgttttgattttttttttttaaaattttataaagaaaaaagaaaaaaaaaaggtaataaaaattttaaaaggaagggaaaaattttttttttaatagaaatgattgttttatatgttagttttggttgtgagtttaagtttggtgtagggtttgtggattggtgggtattgggggtttgggatggtggtttagatgtgagttttagtgggatttgggttttagaattgggagatggtttggttagggttaattttgtttttggggattttggggaggttggttggggttttttagtgttaggttattttttggggattttaggtttatggataagtatgaatatggttgagtgtagttttttttgggttgtttattttataggttgggtttgtgatgttgttattttttgggatttttatatttggagagtttaattttgttgggggtgtttttggtgatgttttggttttattgtttgttttaggagtaaatgttttgttgtggatgattgagtggattttttggggggtgttgatttttgttggtttgggtgagtgtttggggggttgggggtgtttgggaggttttttgttgtggttaatagttttgtttagggttggttgttgtttggtgtttgtgagggtttgtattgggtgttttttgagttggtttgtgatttttaaggtggttgttggggtttggtaggtgtttttttttttgtaaatgtttgtttgagtgtgtgttttgttttgagtgtttttagtgtttggtttgtggggtggtgtggtggtgggggttttatggggtttttggtggttgaggtggtgtaggttgtaggttttgggttggggggtttttgaaggtgttgggttttgggtggtgtgttttttttgttgtggttgttgtgtgtgtggaggaggtggagtggtgaggggggtttagtttatttaaggttgtggtagtaagtgttgttatttgtgttttttttgttgttttgtgttttatttgtgggtgttttgggttgttttttttttttgtgtttgatatgttgttgttattttgtttatttttttttttttttttgtgttgttgtggatattgtatgtttggttgtagggtatgtttttttgtgaggatgatgtgtttatttgttggttgaatttgttatttttggttttttgtttgttttgttgttgttgatgattggagtgtttggatttggttgggtgtttgagtggtgattggttggtgtttggttttgtttgaggggtggatatagtgtgtttattggtttttggagatgtttgttatgggtagggggtgggaagtaggtatggggagatgaggttatggttgtgattttggtggggtttgggaagggggttgtaggttatgggtgttaatggtttttttgaatggttgtagggtgggttgagtttggtgggtgggaatttgggtttgtggatttggaaggagtggggttatttttattagagttttttttttgtatttttttttggggtgaggttaagggttaaaaagtaatataaagtggttaattttagttaaaaattttttttttgagttatttttggattaggggaaagagaaatgtttagggtggtttttgttttattggaatttatgggggaagttttaggatagtgttgggataagtttagtgggggttttttgtgaaaaataagagttgttaaaatatggtttgataaggttgaaaatattgaatttttttgtgttagttttgtgttttttatttttttttgtattagtgttaggttgtttagttggaataaattattttggtataatttttgttttttggttttaagtgatttttttgttttagtttttttagtagttgagattataggtgtgtgttattatgtttggttaatttttgtatttttagtagaaattataggtgtatgtttgtaattttagttatttagaaggttgagggaggagaattgtttgaatttgggaggaggaggttgtggtgagttgagattgtgttattgtattttagtttgggtaataagagtgaaattttgttttaaaaaaaaaaaaaagattttttttagaaaattgaagttgaaggaatattttttaatttaaatttattttggtattttttttttgtattgattgttggtttatattttaattttttggaatttggagataatgttggataattggtattggtaggttttatgtttttttagagaattgtaggatatatggaagtgatttaggaaatatttggtgattattatagatagaatttttgaagatggattttttgtttaaagattattttttttaagaattttttttagttatttttttaagtgtttggatggagatgtgttgtgagtgtgaattatatatggaatttttttgtttttttgatatgtataattttattataaaatgttaaaaaatgtagtattttaaaaaatgtaagatgtattgttgatattaatttttataagtgtgttgtgttgttatatataataaattttttaaaaattattaaatatttagggatattaggtagggtgtggtggtttatatttgtaattttagtattttgggaggttgaagtaggtggattatgaggttaggagtttgaaagtagtttggttaatatggtgaaattttatttttattaaaaatataaaaattagttgagtgtggtggtatgtgtttgtaattttagttatttaggaggttgaggtaggagaattgtttgaattaggatttgggaggtggaggttgtggtgagttgagattatgttattgtattttagtttaggtaataagagtgaaattttgttttaaaaaaaagaaaagaaaagaaaagtattttttgtatagagaattttatgagttatatgaaaatttgtatagttttatattgaagttaatattgagttgtattagaatttatatttttagtaaaataagtttattgtataggtattattaaaggatagttatttattttttatttttattttttttttttttatttttattttttttttttttttttttttttttattttttggtttgtttttttttgagttttttttttttgttttatttttgtttttagtatgatatgtagtaatattttttttatattttttttgtagtttaattgttttttgtttatatggttgtttatttttggttgattgtttagattatattttatttagtttttttgtagtttttatgataaataggtttgggtgtttatttttgatttttgggtgatgtttagagtaaaataggaagaaggtagatggtggttttttaggagtattgtgattttttttttttttttttttatttttttttatattttggaggaatgtaatttttaatttttttgttatagtgagttttgttattttttgttttttttttaaattttattttttttttgtagatgtggttttttatttttttaaatattttttggagaattttatgaaattgatagaagagtttgggtgtttttttttgtgttttttttggtaggtttgtgtgaagagggtatatgaggatattttgttttttggtttgttggggtgttttttatttatggggatagaatagtatttatttggtgtgagtttttttttagagttttatagagtatttggatttaatagagatatttttttttatattgattttttttttttttttttgagatggagttttgttttgttgtttgggttggagtgtaatggtatgattttggtttattgtaatttttgttttttagatttaagtaatttttttgttttagtttttggagtagttgggattataggtatatattattatggttggataatttttggatttttaatagagatagggttttattatattgtttaggttggttttgaatttttaattttaggtgatttatttgttttggttttttaaagttttgggattataggtatgaggtattatgtttgttttatatattgaatttttaaagttagaaaaattaaaaatgggtttgttaggtatggtagtttatatttgtaattttagtattttgggaggttgaggtggatggattatttgaggttaggagtttgagattagtttggttaatgtggtaaaattttgtttttattaaaaatataaaaattagttaggtgtggtggtgggtgtttgtaattttagttatttgggaggttgaggtaggaggattgtttgaatttaggaggtagaggttgtagggagttgagattttgttattgtattttattttgggtaataatgagattttgttttgaaagaaaaaaaaatgggtttggtatggtggtttttgtttgtaattttagtattttggggggttaaggtaggtgattatttgaggttaagagtttaagattagtttgggtaatatggtaaaatttttgtttttattaaaaatataaaaattagttaggtgttgtggtgtttgtttgtaattttagttatttaggaggttgaggtaagagaattgtttgaatttgggaggtagaggttgtagtgagttaagattgtgttattgtattgtagtttgggtaatatagtgagatttggttttaaaaaaaaaaaaaaagggtataaataaaatattttattggttagatatagtggtttatgtttgtaattttagtattttaggaggttaaggtgggttgattatgaggttaggagtttgagattattttggttaatgtggtgaaatttggtttttattaaaaatataaaaattagttgggtgtggtggtgggtatttgtaattttagttatttgggaggttgagataggagaaaggtgtgaatttaggaggtggagtttgtagtgaattaagattgtgttattgtattttagtttgggagatagagtgagattttgttttaaaaaaataaataaataaaaataaaataaaatattttattaataattttaataatgattgtatgttgaaatgatgtaattttggatatgttaggttaaagtaaatgtattattaaaattaattattttagggttatgtatagtggtttatatttgtaattttagaattttgggaggattttttgagtttaggagtttgaggttagtttgggtaatatagtaagaatttgttttaaaaaaaaataaatatataaataataggttaggtgtagtggtttatgtttgtaattttagtattttgggagg

SEQ ID NO: 250 - DNA, 11029 bp, Artificial Sequence
  chemically treated genomic DNA (Homo sapiens)
tagagtgtgtgtgtgatgaataagtgtttgtgtgatgatgttttatttgtgtaattttttagttatggaagggtatagttttatgatgtttttagtgaaattttggtttatgaggatttttatatatatattttgttatggggattgtattgtttaaatatgtgagagtaaggttttggttatgtgttaataaaatagttaagttttttatggaagaaaaatggaagttttttgaaaggatttatatttttgtttgagtttgtggaagaggggtttgtagttggtaatgtgtatatatatgtgtatttgttattttgtggaaattataattggttaaggggtgtaagattgatttatgtaggagagttgtagtattatggagtagaatgtggttatgaaatttggattttagttttttgtttattattaattagtgttggttagggtgtttttttaattgttagtgaagggattggattagataattttgaagatattttttttgagaattaagtaatttgttttaaggttgggtgtggtggtttatgtttgtaattttagtattttgggagggtgaggtaggtagattatttgatgttaggagtttaagattagtttggttaatatggtgaaattttatttttattaaaaatataaaaattgatggttgtgtatggtggtttatgtttgtaattttagtattttgggaggttgagataggtgaattatgaggttaggagtttgagattagtttggttagtatggtgaaattttgtttttattgaaaatataaaaaataagttaggtatagtggtgggtgtttgtaattttagttatttaggaggttgaggtaggagaattttttgaatttaggaggtagaggttgtagtgagttaagattgtgttatggtattttagtttgggtgatagagtgagatttttttttaaaaaagtaaaataaaaatataaaaattagttaggtgtggtggtatgtgtttgtagttttagttgtaggttgaggtagaagaatgatttgaatttgggaggtggaggttgtagtgagttgggattgtattattgtattttagtttgggttatagagtgagattttgtttggaaaaaaaaaaaaaaaaaaaaaaaaaaaaaaaaaaaattttttttttaatttttaaaaaatttttaaaatttggattaaggtttttaattttggaaattttggggattttggttaaaaagattttttaaggaattggggtggggaaaaaaaagtttttttaatttagggttaaaatattttgtgggggttttaaagtggggttttaaataggtggggaaaatttatggattgtttttttttggtttaattttttaattttttttagttttttggaattttatgggtttttttttttaattttaataattttttaaaagggttttatgggtttaaattttttttttgtttttggatttgaatttattttttttaggggaattttttattttttttttttttaaaatttttttggggggggtataattttttttgtatggtaaattggttttggggtttagtttttggaaagtttgttttttggaattaggtttgtttttggggtttttatgggggatttttaaatttggttttttgtaaatttgggggttaaggggtaaagtttttttggttttgaatttttattattttagggttgagtgggtaggtatagtggtttatatttgtaattttagtattttgtggaggttaaagtgggaggattgtttaattttaggagttttagattagtttgggtaatatagtaaaatgttatttttatgaaaaatttaaaaaattaggttaggtgtggtggtttatatttgtaattttagtaatttgggaggttaaggtgggtagattatttgaggttagaagtttgagatttagtttggttagtatggtgaaaatttgtttttattaataatataaaaattagttaggtatggtggtgggtgtttgtaattttagttatttgggaagttgaggtaggagaattgtttgaatttgggaggtggaggttgtagtgagttgagattgtgttattgtattttagtttgggtgatgagtgaaattttggtgtttttttattttaattttttttttgtatttttagttttttaggaggtaaaggtgggagaattgtttgagtttaggagtttgaggttgtagtaagttatgattgtattattgttttttaggttgggagaaagtaaaatattgtttttaaaaataaaaattaggttgggtatggtggtttatgtttgtaattttaatatttagggaggttaaggtgggtggattatgaggttaggagtttgaaattaatttggttaatatggtgaaattttgtttttattaaaaatataaatattagttgggtaaaatgggggggttttttaattttaggtttttagggggtttaggttaaaaaatttttttaattttggagtttaaggttttttttggttaaatttgggttaagggtttttagtttgggggtaaaaagggaatttttttttaaaaaaggtaaattaaaattttaaaattattttgggttggtggttttgttttttagttttaattgtaggtttaggttaaaaaatgatttgaatttgggaagttaaggttttaataaattgggattgtttttttgtatttaaatttgggttttaaaagggaatttgttttggaaaaaaaaaaaaaaaaaaaaaaaaaaaattttgttttaagtattgaaaaagttgtgaaagttgtgattaagtttttatattttgagaattttgggattgttggttaatagtatttgttatgtagttgggttgggataaataaagtttatttaatttagtgttagatattttgtgtgggtatttaagatggtgttttaatatgttgtgtaatattaatgaatgtattatatatgattaaatatgttaatgttttttagttttttgaatatttattgttttttttttttatttttattaatttttgaaaaggttttaatggttttaattttattattagtattagaattagaatttattttttttatggatatatttatatttatttattttaataattttatgagggaggtagtagttttattgtatagtaaaataggtatagagattaagttattgaaaagtatgatttttgtaattagagtagttttttggattttattgttgtattttattatttgtatattagtaaatttggggtttataggttatagatttttttagttttgatatttttattattttatagtttttgaatttttttttttagtttgtttttattgtttagataatgttttaaatatatttttgtatttattttgaagtaaaataaagtaatttttaatttgttttgggttggaagttttttttttttatatatttggtagaaattatatagttgaaagtttgtttttttaaaaatttgttgtaagatattggtaatttttatgaaggatgtgtgagggtatgaaaagtgtgaggggtggtagttatttttaagatattattttattaatattattattaggttatggtttttgtgttggtagtgtgttgatagtttagtgtgttggtagttttttatatttttgattgttttttattttgatgaaaattatagaaattattttattatagttgattagagtgatggttagtaattaattagttaattagtttagtagtgatattgttgtattttttaatttttttagaattatgatgttaatattatatataaataaaaggaaaataaaaatatgagattttttttttagagagtagtaagaggggttaggtatagtggtttgtatttgtaattttagtattttgagaggttgaggtgggtagattatttgaggttggaagtttgagattagttttattgatatggagaaattttatttttattaaaaatataaaattagtttggtgtgatggtgtatatttgtaattttagttatatgggaggttgagatagaagaattatttgaatttgggaggtggaggttgtggtgagttatgattatgttattgtattttagtttgggtaataagagtgaaaattttgttttaaaaaaaaaaaaaaaaaaagtaagagggtaaggtaggaagtaatattttatatgtgaaagtgtattttagtgtaatgtataggagttttgataaaagatgtgtagaattatagttttattatgagttattttttgtatttataagtagaaagttgattattttttttaagttaaaaaaataatgttgggggagatggtgtttgtgtgagtgaatagaaatttagatggtttaaatgttttaaggtttgatatttttttttaatttttttaagaaattaattggtttgaaaaaagttattttgtaaaagagggaaaaaaagttggattttttagttgttgagaaggtatgtttatgtaatatgagtttaaagtgaatagttatttttgtatggattattatatatttttgttttggagggaaaaaagtttgttagagaatgtaaaatggtgatttttagtgatgttatatttgttttggttgtgttttggggtgtttgtaagggtggaagtgggttatagttgttttattgtgggtggttgtggttattatgtaaaaggaaaagttttagtgttgggtggatgtgtattggtggtaatatagtaagggtggaagtttttttttaagggtggaagttttttttttaagggtggaagttttttttttaagggtggaaaggttttagttgtaaaatggttttggtttttgttgtgttatagttatttttggggtggattggaagttgttttgttttgttttgagatggttgtggggatgtatttggaatattatttggatagtaagagtaggttggaggtgggggttggggttgtagagtggtgtggggattagggatgagaggatttgtagtttttaagttttagtgatgagaaggttataattatgaagtggttttgtggtaggaaatattggagggtgtggagaaagagggggtggggtagtaggattgaggttttgttgatgggtgtagatgagggaggggtgtggtgtgggggttagagatgtgttttgaagggttagtgtgtatggttaggaagatagttgttgtttttattttttagggtttttagttttggtagatttttttttttatagttgtttagaattgttattatatattgttatttggagtagtggtaaagattttttttttattttatttttttttaaaagtggttttttatggggttgagagtggtggtgatgagtgattattgttagatgatgaattagaatgtttttttttatggagtaaagatttaatttttattaaatgaaaatttggtgtttatgtgatttatgtaaattatttttgtagaaagtttattgttttgtgtgtttatatttgttttagggtttggagttatttatttaataaatatttattgaggttttgttatgggttagatataatggtaggtattagggatagaaaaatgagtaagataaggtttttgtttttaagaagtttatgatttagtaggaaatagattttgtaaataattataaaatattgtgataagtgagataatggaaatatattaaaaaggatatttggtaggtaattttggagaaaaggggggtaattatttggggatgtaggaaaagttttatagtggaggtgatgtttgaatagggttttgaaggttatttgttagtgaggagagaaaaaaggaattttaggttggggaaagtatttgtaaaggtattgtgatgggtttgtggtaaggttaagggtgtttgatatttatgatttagaggttagtgtatttgatatttatgaatttaaggtaagaaattgagaaaggagattggagaaagaggttgaggttagattggataaggttttttaagttaaatgaagaagtttgtattttaaagtagagtatgatttttatagaggaaaatgattaatatatggtaaattggagtatgatattgttgataatagagattaattagtgataatattttaggatagagataagaatttgattttagggagttatagaagtatttaggagttaaatatgaaaggattgattgaatgattgagtggttgagagagaaggaagaatttaaggtggtttttttttgtttagaaagtgaggtagataggttgggtatagtagtttatgtttgtaattttagtattttgggaggttaaggtgggtagattatttgaggttaggagtttgagattattttgtttaatatggtgaagtttagtttttattttaaaaaaaaaaaaaaattagttgggtatggtggtatgtgattgtaattttagttatttgggaggttgagttaggagaattatttgaatttagtaggtgaagattgtagtgagttaagattatatatattattgtattttagtttgggtgatagagaaagattttgtgttttttttaaaaaaaaaaaaaaaaaaaaaaaaaataaaggttggtggttaggtatggtggtttatgtttgtaattttaatattttgggaggttgaggtaggtggattatgaggttaggagattgagattagtttggttaatatggtgaaattttgtttttattaaaaataaaaaaaatagttaggtgtggtggtgtgtttttgtagttttagttatttaggaggttaaggtaggagaattgtttgaatttgggaggtggaggttgtagtgggttgagattatgttattgtattttagtttgggtaatagagtgagattttgttttaaaaaaaaaaataaaaataaaaaggttgggagtggtgtttatgtttataattttagtatattgggaggttgagatgggtggattgttttaggttaggagttttaagattagtttggttaatatagtgaaattttgtttttattaaaaatataaaaattagttgggtgtggtggtagatgtttgtaattttagttatttgggaggttgaggtataagaattttttgaatttgagattgtgttattgtattttagtttgggtgataagagtgatattatattttaaaagaaaagaaaagaaagttatttagtggagaaaagattatgttaattgttgtagagatattttttaggataggtttaataatattattagatttggtaaattattagtgatttagttttgtgaattggtggtagtagatttgaagttgtaggtttaaatagtagaggtattttatttttttttatttattttattttagtttttttgtttgtttgtttgtttttgagatagagttttattttgttatttaggttggagtgtaatggtgtaattttggtttattgtaatttttgttttttgggtttaagtgatttttttgttttagttttttgagtagttaggattatagtgtttgttattatatttagttaatttttgtatttttagtagagatgaggttttattgtgttggttaggttggttttaaatttttaattttaggtgatttatttattttggttttttagagtgttgggattataggtatgagttattgtattaggttttttattttttatatatatatttaatttttatagagataggatttggttatattgtttaggttggttttagatttttgagattaagtgatttatttgttttggttttttagaatgttgggattataggtgtgagttattgtgtttagtaagtagaggtatttttaaagttttaggtggagttttggtaagagattttttttgtattggggtgataaatatttatgtatttatttaagtatttattgagtatttgttttttgtaagttataattttaaatattatggaaataggagagaatatgatagttatgtttggtttggggagatagatattaaataattaattatatattattttttttaatttttttgttttttgaaatagttttgtttttttgtttgggttgtaatttttatttttttggtttaagtaattgttttgttttagttttttgagtaattggaattatagttataggttattatgtttatttattttttttttttttttttttgagatagagttttgttttgttgtttaggttggagtgtagtggagtgattttggtttattgaaagttttattttttggatgtatgttatttttttgttttagttttttgagtagttgggattataggtatttgttattatggttagttaatttttttgtatttttagtagagatggggttttattatgttagttaggatggttttaattttttgattttgtaatttgttttttttggttatttaaagtgttgggattataggtgtgagttattgtgtttggtttaatttttgttttgttttgtttttgagatggagttgtattttgttatttaggttgaagtgtagtggtgtgattttagtttattgtaatttttattttttggatttaagtaatttttgtgttttagttttttaagtatttgggattataggttttattatgttggttaggttggttttgaatttttggttttaagtgagttatttgttttggttttttaaagtgttagaattataggtgtgagttattgtgtttggttttaatttttgtatttttagtagagatggggttttgttaggttgttaaggttggttttgaatttttggttttgagtgatttatttgttttttagaatgttggattataggtatgggttattgtatttagttaattaattatatatttatttaattatagttggataagtgttttaaaaaggtggttagaatattttgatatagattgagggtagttaatagagtttgggaaagttgagtttgagttgaattttggaagaatgaataggaatttaataggttaagagggatggggtggatgggatgaggaaaaatgagtggtgtattttaattagagagaatagtatgtggaaagttaaatggtaggaggagtataggttagtttgaggtagtgtgaggaggttagtatgggtaaagtagagtataaagggagattgatatgagtttaggttggtgtgaggtaagtaagggttagaaagtgtagaatatttttagagtagtaggaagtgattagaaggttataagtgggagagtgatttgattaggtttgtattttttatttttgtgtttgtttttgtttttgtttttttgagttagtgttttgttttgttatttaggttggagtgtattggtgtgattttggtttattgaaatgtttattttttaggtttaagggatttttgtgttttagttttttaagtagttgggattataggtatgtgtattaagtttggttaagtttttgtatttttggtagagatagagttttattatgttgtttaggttggttttgaattttttagtttagttgatgtgtttatttgggttttttaaagtgttgggattataggtatgagttattgtgtttggttaggtttgtattttttaaaaaggatattttggttattatatggaagtagattggaagtgttatgtgtataatagaggatattaggagattatttgtaatttgaggataaagagtttggaggtagagatggaaaataaaagaaaggggtttgttttagtggtttatgttagtaattttagtattttgggatattaaggtgggtggattatttgaggttaggtgatgaatgtaggagtatgtttattaaggtaaagaaagggaagagtttttttttttttttttggagatagagttttgttttgttattaggttggagtgtagtagtgtagttttggtttattgtaatttttgttttttaggtttaagtgatttttttgttttagttttttgaatagttgggattataggtatgtgttattatatttggttaatttttatatttttagtagaaataggtttttattatgttggttaggttggttttgaatttttgattttgtgatttatttgttttaattttttaaagtgttgggattataggtttgagttattatatttgatgggaagagtttatttataaaggaaggttattgaaggtgaaaagggtgggatagttatgtagaaatggaaaggttttgtagagaaagagttaagtatggtttgttatgagagaattgatttattttgttatagataaatttagaggtttagaggaaggaaaattgagttgtattttattttttgtttgtttgtttgtttgtttgagatggagttttattgtgttgtttaggttggagtgtagtggtgtgattttggtttattgtaaattttgttttttaggtttatgttatttttttgttttagttttttgagtagttgggagtataggtgtttgttattgtatttggttaattttttgtatttttagtagagatggggttttattatgttagttaggatggttttaattttttgattttgtgatttgttttttttggttttttaaagtgttgggattataggtgtgagttattatgtttggttatttgtttgtttttgagatagggatttgttttattgtttaggttggagtgtagtggtttaattatggtttattgtaatttttgttttttggatttaagtgatttttatgttttagttttttaagtagttgggattagagatgtttattgttatattaggttaatttttatatttttaatagagatggaggttttgttatgttggttaggttggttttgaatttttggttttgagtgatttatttttttggttttttaaagtgttgggattgtaggtgtgagttattatgtttggtttgaattgtattttaaaaggagttgtaaggtttatgtatagttagttttgtgattgttttttttttttttt

SEQ ID NO: 251 - DNA, 11029 bp, Artificial Sequence
  chemically treated genomic DNA (Homo sapiens)
gggaagagagagaaataattataggattgattatgtataggttttatagttttttttaaagtgtagtttaggttggatatggtggtttatgtttgtaattttagtattttgggaggttaagggggtggattatttaaggttaggagtttaagattagtttggttaatatggtgagatttttatttttattaaaaatatgaaaattagtttagtgtgatggtgggtatttttaattttagttatttgggaggttgaggtatgagaattatttgaatttaggaggtagaggttgtagtgagttgtgattgagttattgtattttagtttgggtaatagagtaagtttttgttttaaaaataaataaatggttaggtatggtggtttatatttgtaattttagtattttgggaggttgaggagagtagattatgaggttaggagattgagattattttggttaatatggtgaaattttgtttttattaaaaatataaaaaattagttaggtgtgatggtgggtgtttgtatttttagttatttaggaggttgaggtaggagaatggtatgaatttgggaggtggagtttgtagtgagttgagattgtattattgtattttagtttgggtgatatagtgagattttattttaaataaataaataaataaataaaaaataaagtgtagtttagtttttttttttttgaatttttggatttatttgtgataggatggattagtttttttatgataggttatgtttaattttttttttataaaatttttttatttttgtatggttattttattttttttgtttttagtgatttttttttataaataagttttttttgttaggtgtggtggtttaagtttgtaattttagtattttgggaggttgaggtgggtggattatgaggttaggagtttgagattagtttggttaatatggtgaaagtttgtttttattaaaaatataaaaattagttaggtgtggtggtatgtatttgtaattttagttatttaggaggttgaggtaggagaattatttgaatttgggaggtagaggttgtagtgagttaagattgtattattgtattttagtttggtgatagagtgagattttgtttttaaaaaaaaaaaaaaaagtttttttttttttttattttgatgaatatatttttatgtttattatttggttttaggtgatttgtttgttttgatattttaaagtgttgggattattggtatgagttattaagatgggttttttttttttattttttatttttgtttttaagttttttgtttttaaattataaatagttttttggtattttttattatatatataatatttttaatttatttttatatagtagttagaatgttttttttaaaaaatgtaaatttggttaggtatggtggtttatgtttgtaattttagtattttgggaggtttaggtgggtgtattagttgagttgaggagtttaagattagtttgggtaatatggtgaaattttgtttttattaaaaatataaaaatttagttaggtttggtgtatatgtttgtaattttagttatttgggaggttggggtataaaaattttttgaatttgggaggtggatattttagtgagttgagattatgttaatgtattttagtttggatgatagagtaagatattgatttaaaaaaataaaaataaaaataaatataaaaataaaaaatgtaaatttaattaagttatttttttgtttataattttttggttattttttattgttttgaagatgttttgtgttttttggtttttgtttattttatattagtttgaatttatgttagtttttttttgtgttttgttttgtttatattggtttttttgtattgttttaaattggtttgtgttttttttgttatttggttttttatatgttgttttttttagttggaatgtattgtttgtttttttttattttatttattttattttttttggtttattaaatttttgtttgtttttttaaagtttagtttaaatttaatttttttagattttgttaattgtttttgatttatgttaaggtattttagttatttttttaaagtatttatttaattgtaattaaataaatgtgtaattagttggttgggtgtggtggtttatgtttgtaatttagtattttggaaggtaggtggattatttaaggttaggagtttaagattagttttggtagtttggtaaaattttatttttattaaaaatataaaaattagggttaggtatggtggtttatgtttgtaattttagtattttgggaggttgaggtgggtggtttatttgaagttaggagtttaagattagtttggttaatatggtgaaatttgtaattttagatatttgggaggttgaggtataagaattgtttaaatttgggaggtggaggttgtagtgagttgagattgtattattgtattttagtttgggtgatagagtgtgattttattttaaaaataaaataaaataaaaattaggttaggtgtggtggtttatatttgtaattttggtattttgggtggttgaggagagtagattatgaggttaggagattgagattattttggttaatatggtgaaattttgtttttattaaaaatataaaaaaattagttggttgtggtggtgggtgtttgtagttttagttatttgggaggttgaggtaggagagtggtgtgtatttaggaggtggagtttttagtgagttgagattgttttattgtattttagtttgggtgatagagtgagattttgttttaaaaaaaaaaaaaaaaaaaatagatgggtatggtggtttgtggttgtagttttagttatttaagagattgaggtaggataattgtttgaattagggaggtagaggttgtagtttgggtaaaagagtaagattgttttaaaaaataaaaaaattaaaaaaaataatgtgtaattagttatttggtatttgtttttttaggttgaatatggttattatatttttttttgtttttatagtgtttagaattatgatttgtaaagagtaggtatttagtaaatatttgaataaatgtatgaatatttgttattttagtataagagaaattttttgttaaggttttatttaaaattttaaaaatgtttttatttgttgggtatagtggtttatgtttgtaattttagtattttgggaggttaaggtaggtagattgtttgattttaggagtttgagattagtttgggtaatatggttagattttgtttttataaaaattaaatatatatataaaaaataaaaggtttggtatggtggtttatgtttgtaattttagtattttgggaggttaaggtgggtggattatttgaggttgggagtttgagattagtttggttaatatagtgaaattttatttttattaaaaatataaaaattagttgggtatggtggtgggtattgtaattttagttatttaagaggttgaggtaggagaattatttgaatttgggaggtagaggttgtagtgggttaagattgtattattgtgttttagtttgggtgatagagtgagattttgttttaaaaataaataaataaatagaaaaattaaaataaaataaataaaaaaaaataaaatgtttttattgtttaaatttataattttaggtttgttattattagtttataagattgagttattggtgatttattaaatttaatggtgttattaagtttattttaaaaaatatttttgtagtagttggtatgattttttttttgttgagtaatttttttttttttttttttgaggtgtagtgttgtttttgttgtttaggttggagtgtaatggtgtaattttaggtttaaggaatttttgtgttttagttttttaagtagttgggattataggtgtttgttattatgtttagttaatttttgtatttttagtagagatggggttttattatgttagttaggttggttttggaatttttgatttaaggtgatttatttattttagttttttaatgtgttaggattataggtgtgagtattgtttttagtttttttgtttttgtttttttttttgaggtggagttttattttgttgtttaggttggagtgtagtggtatgattttggtttattgtaatttttattttttaggtttaagtgatttttttgttttagttttttaagtagttgggattataggggtatattattatatttggttattttttttatttttagtagagatggggttttattatgttagttaggttggttttgattttttgattttatgatttgtttgttttagttttttaaagtgttgggattataggtatgagttattgtgtttggttattagtttttgttttttttttttttttttttttttttgagagggatatggagtttttttttgttatttaggttggagtgtagtggtatgtatgattttagtttattgtaatttttatttgttgggtttaagtgatttttttgatttagttttttaagtagttgggattatagttatatgttattatgtttagttaatttttttttttttttaaagtagagattgggttttattatgttggatagggtgattttaaatttttgattttaagtgatttgtttgttttggttttttaaagtgttgagattataggtatgagttattgtgtttagtttgtttattttattttttaagtaggaagaagttattttagattttttttttttttttaattatttagttatttagttagtttttttatatttaatttttaaatatttttgtaattttttaaaattaggtttttatttttgttttggaatgttattattaattgatttttgttattaataatattatgttttaatttattatatattagttatttttttttataaaaattatattttattttaaaatgtaaatttttttgtttggtttaaaagattttgtttaatttagttttagtttttttttttagtttttttttttaattttttattttagatttataaatattaaatatgttgatttttgagttataaatattaaatatttttgattttgttataaatttattatagtatttttgtggatgttttttttaatttggaattttttttttttttttttattggtaaataatttttaagattttatttaaatattatttttgttgtaaagttttttttatatttttaggtaattattttttttttttttagggttgtttattaagtgttttttttaatgtatttttattattttatttgttatagtgttttataattatttgtagaatttgttttttattagattgtgagttttttgagggtaggagttttgttttatttatttttttatttttagtgtttgttattatgtttgatttatagtaggattttaataaatatttgttgaataaatgattttgggttttaaaataaatgtaagtgtatagagtaataggttttttgtaggggtggtttatataaattgtataaatattagatttttatttgatgggaattagatttttattttatgaagagaagtgttttagtttattatttgatagtggttatttattattattatttttaattttatgagaagttatttttgaggaagaatggagtggaggagaggtttttattgttgttttaaatggtagtgtgtgataatgattttgaatgattatggggaaaaaaatttattgaggttggagattttggagaatgggggtagtaattatttttttggttatgtatattagttttttaagatatgtttttaatttttatattgtattttttttttgtttatatttattagtggggttttgattttgttgttttgttttttttttttttgtattttttaatattttttgttatagaattgttttataattgtgatttttttgttattggaatttaagggttatagatttttttatttttgatttttgtattattttgtagttttgatttttatttttagtttgtttttattgtttagataatgttttaaatatatttttgtagttattttgaagtaaaataaagtaatttttgatttgttttggaagtgattgtaatgtgataggggttgaagttattttgtggttaaagtttttttgtttttaaaaggagaatttttgtttttaaaaggagaatttttgtttttaaaggagaatttttgtttttattatattattgttggtatatatttgtttgatattgaaatttttttttttgtatggtagttatgattgtttatagtgaggtggttgtagtttgtttttgtttttatagatattttaggatgtgattgagataggtatgatgttattggaggttgttattttgtattttttagtaaatttttttttttttaaaatgggaatgtatggtaatttgtgtaggggtaattgtttattttaggtttatattgtgtaaatatatttttttagtaattggaagatttaatttttttttttttttttgtagaatgattttttttaagttagttagttttttaaggaagttggggaagagtattaggttttgagatatttaaattgtttgaatttttatttatttatataaatattattttttttagtattatttttttaatttgagaaagatgattaattttttatttataaatataaagaatgatttataataaaattataattttgtatattttttgttagagtttttgtatgttatattagaatatatttttatatataaaatattattttttgttttgtttttttgttttttttttttttttttttgagatagaatttttatttttattgtttaggttggagtgtaatggtgtgattatggtttattgtaatttttattttttgggtttaagtgatttttttgttttagttttttgtgtagttgggattataggtatgtattattatgttagattaattttgtatttttagtagagatggggtttttttatgttggtgaggttggttttgaatttttgattttaggtgatttgtttattttagttttttaaagtgttgggattataggtgtgaattattgtgtttggttttttttgttattttttaagggggaaattttgtgtttttgttttttttttgtttatatgtgatgttagtattataattttgaagggattgagggatgtagtagtattattattgggttagttggttagttagttgttagttattattttagttagttatggtagagtgatttttatggtttttattagaatgggaagtagttaagggtatgagaggttgttaatatattaggttgttaatatattgttaatataaaggttataatttaatagtggtgttagtaagatagtattttagagatagttgttattttttatattttttgtatttttatatattttttataagaattattaatgttttatggtaagtttttaaagagatagatttttagttatataatttttattaaatatgtggagaagaggaatttttaatttggggtggattggaagttgttttgttttgttttgagatggatgtagggatgtatttgaaatattatttggatagtaagagtaggttggaggagggggtttaggggttgtagagtggtgggggtattagagttgaaaggatttgtagtttgtaaattttaggtttattagtgtgtaggtagtaagatatagtaatagaatttgggaaattgttttaattataaaagttatgttttttggtaatttgatttttgtgtttgttttattatataatgagattattattttttttatagggttgttggaataagtgagtgtgagtgtatttataaaaagagtagattttagttttaatattggtgatgaagttagggttattagggtttttttaagagttggtgagagtgggaggaaaaagtagtaaatatttagggagttaagaaatattggtatatttggttatatgtgatatatttattggtattatataatatattgagatattattttaggtgtttatataggatatttagtattaaattaagtgggttttatttattttagtttaattatataataagtattattggttagtagttttagagtttttaggatgtgggagtttggttataatttttataatttttttggtgtttaaagtaaggttttttttttttttttttttttttttttttaaaataaatttttttttggggtttaggtttgagtgtaggggggtaattttggtttattggaattttggttttttaggtttaagttattttttggtttaaatttgtagttgggattaaggggtggggttattaatttggggtaattttgggattttaatttattttttttgaaaaaaagttttttttttgtttttaggttggaagtttttggtttaaatttggttaaggggaattttgggttttaaggttaaaaaaattttttggtttaaattttttgaaaatttggaattggggggtttttttattttgtttagttaatatttgtatttttagtagagatggggttttattatgttggttaggttggttttaaatttttgattttgtaatttgtttattttggtttttttaagtgttgggattataggtgtgaattattgtgtttagtttaatttttatttttggagatagtgttttgtttttttttagtttggagggtagtggtgtaattatagtttattgtagttttaaatttttgagtttaagtaatttttttatttttgttttttgagaagttgggaatataaaaaaaaaattaaaataaaaaaatattagagttttatttgttatttaggttggagtgtaatggtatgattttggtttattgtaatttttattttttaggtttaagtgatttttttgttttagttttttaaatagttagaattataggtatttattattatatttggttaatttttgtattgttagtagagatgggtttttattatattggttaggttaagttttgaatttttgattttaggtgatttatttattttggttttttaaattgttgggattataggtgtgagttattatatttggtttaattttttaaattttttatagagatgatattttattatgttgtttagattggtttgaaatttttgaagttaagtaatttttttattttggtttttataaagtgttgggattataagtgtgagttattgtgtttgtttgtttggttttaaaatggtggggatttaaagttaaagagattttattttttaatttttaggtttataaggggttaggtttaaaagttttttatagaaattttgaaaatgggtttaattttaaaaggtaagttttttggaaattggattttggggttggtttattatataaaggggattatattttttttaaaagggttttgggaaaaaggagggtgaggggtttttttaaaaggggtggatttaagtttaaaaatggggaagaaatttaggtttatagggtttttttaaaaaattgttaaaattggggggaaaaatttgtaaaattttggggggttaaaaaaaattggaaaattgggttaaaggggaataatttatgggttttttttatttatttgggattttattttggggtttttatagggtattttggttttaaattaagggggtttttttttttttgttttaattttttaaaaggtttttttggttaaaatttttgaggtttttaggattggggattttggtttaaattttaaaaattttttgggggttaaaagaaaggttttttttttttttttttttttttttttttttttttttagatagaattttgttttgtggtttaggttggagtgtagtggtgtaattttggtttattgtaatttttgttttttaggtttaagttatttttttgttttagtttgtagttgggattataggtgtgtgttattatatttggttaatttttgtatttttattttatttttttgagagagagttttattttgttgtttaggttggagtgttatggtatgattttggtttattgtaatttttgttttttaggtttaaaagatttttttgttttagttttttgagtagttgggattgtaggtgtttattattatgtttagtttattttttgtatttttagtagagatggggttttattatattggttaggttggttttgagtttttaattttatgatttatttgttttggttttttaaagtgttgggattataggtgtgagttattgtgtatggttattaatttttgtatttttagtagagatggggttttattatgttggttaggttggttttgaatttttgatgttaagtagtttgtttgttttgtttttttaaaatgttgggattataggtgtgagttattgtatttagttttaaagtaagttatttaatttttaaaaaaggtatttttagagttatttagtttaatttttttattaatagttgaagaagtattttggttaatattggttgatggtaggtaaagggttgaagtttaggttttatgattatattttattttatagtattatagtttttttgtataaattaattttgtattttttaattggttatgatttttataaggtaataaatatatatatgtatatatattgttaattgtaagttttttttttatagatttaggtaggagtgtaggtttttttaagaggtttttattttttttttatagggagtttagttgttttgttaatatataattaaagttttgtttttatatatttaggtaatgtaatttttatgatagaatgtgtatgtagaagtttttataaattaggattttattggagatattatgaaattgtatttttttatgattggagaattgtataaatggggtattattatataagtatttgtttattatatatatattttg

SEQ ID NO: 252 - DNA, 1157 bp, Artificial Sequence
  chemically treated genomic DNA (Homo sapiens)
ggattttgttttttttgaaggttttagggaagagtgttttttgttttttttgaaggttttagggaagggtttgtttttttaggtttttggtggtttgtaggtgtagttttttaatttttttttttaagtggtttgttgtttataaggatatgagttatattggatgaggggtttattaattgatggtttttgtaaagtttttatttttaaataaggttatattgtgaggtattgggagttaggattttaatatagtttttttggtggatataatttaatttttaataatgtttatataattttaagtagggtttggtattttgtgtgttttttggagagtggttgagttaggttttggtagtgtttaggttattggtgattgtagtttttggatggtattgtttattataggttttggaggttgtttttatggttttttgatagggtttttgttggtttgggggtttttgattaggggagtggttttaggaggggagagatttgtgttttgggtttagtgtagttgttttgagtaggattgggatttttattaagtgggtgttgttttatgatttttgtgtgtttttaggattatttgggtatgtggtaggttgtttgtatgtttgtggattatttttgtgataggaaaaggtatgggttatttggtaaattaaggtatagagttttaggtggaagttgggaaggtgttgtttggtttgtattggttgaagggttatttgggttaggtgtatagggtagtggtgttgttggaggattagggttggtgtgttggtgtttagtgaggatgtgtagattgttttaggtttggtgttgttgtattgggtatgtgttgatttggttgggtgggaatattttgttttgtttgggttttgttttagttttgtttttgtgtgttttggttttgtttttgtgtgtttttttgttttttttaggtttttggttttgttttgttttagattttgttttatgttgttatttttgtgttttttggttttgtttttgtgttttggatatgttgggatagtttgtgtttttagaatgttttgtgttttgatgtttgtaggtttttgtggtgtgtattgtttgtgatttggtgagtgtttgggttgttttgtttttggaagagtgtggagttt

SEQ ID NO: 253 - DNA, 1157 bp, Artificial Sequence
  chemically treated genomic DNA (Homo sapiens)
gagttttgtatttttttgggagtgaggtgatttagatatttattaagttgtaaatggtgtgtattgtgaggatttgtgggtgttgggatgtaaagtgttttaggggtgtgggttgttttagtatatttggggtgtgggggtggggttgaggggtatggggatggtggtgtggggtggggtttagagtggggtggagttgaggatttgagaaaagtaagagagtgtgtgggggtggggttggggtgtgtgggggtggagttggggtggagtttgggtggggtggggtgtttttgtttgattgggttggtgtatgtttagtgtggtggtgttgggtttgaggtagtttgtgtatttttgttggatgttggtatgttggttttggttttttggtagtgttgttgttttgtgtgtttgatttggatggttttttggttggtataagttgggtggtgtttttttagtttttgtttgaggttttgtgttttagtttgttaaatggtttgtatttttttttgttatagggatagtttgtgggtgtgtaagtgatttgttatgtgtttgagtggttttgaaagtgtgtgggggttgtaggatggtgtttgtttagtgagaattttggttttgtttggggtggttatgttgagtttggagtgtgagtttttttttttttggggttgtttttttagttagggatttttagattagtagagattttgttagggggttgtgggggtagtttttagggtttgtggtgggtgatgttgtttaggggttgtagttattgatggtttagatattgttagagtttgatttagttgttttttagagagtatatagggtgttaggttttgtttggggttgtgtggatgttattaggagttgaattgtgtttattagagaagttatgttggagttttaatttttagtattttataatgtgattttatttggagatggggattttatagaagttattaattagtgggttttttatttagtatgatttgtgtttttataggtagtaggttgtttggggaggaggattggagggttgtatttgtaagttattagaagtttaagaggatagatttttttttggagtttttggagggagtagaggatatttttttttggagtttttagagggagtaggattt

SEQ ID NO: 254 - DNA, 8093 bp, Artificial Sequence
  chemically treated genomic DNA (Homo sapiens)
ttatggaaggaaatgagattagttagtgagttgatatagaataaggtagtttaaaataaatttttttaaaaatatgaagaatagatattgaagggaagaggtgtttgtaaagattaagaaagtatatttggagatggtatttttttaaagttaaagttattaagtgtttaagtgttttaaggagggtaagattattaataaggatttagtatagtagagtaatttgagtggtaatatgggatattgggaatataaatttgttaagaaaattagtaggaatgagttataggatagtaattggtaaggatttaataattttttttttaatgtatgtattttaattatatttattgttataataggattagtaataattatatttatttaaaaaaaaaaagattgttatgtagttatagaattatttaatatagaaaatagtaaaatatatttttttttttttttttttttttttttttttttataaataagattagtttatagtaaattttttatagttaagggttaatttaaaatttttggtttatattttttttttatttaatgattatatgatgtaaattaattttattaatattttaagtaaaatatattggaattttataaaatgtataagattttaatatttaaggaattggggttagaaagtagaagtggtttttaggttttttagttttttttttaagtaataaagttttgttgtgaatatttaaagttattgggaaattattggtagatttttttgttttttttttttggttttttattatgttgtttttttagatatgtaagtttattttattaattaaaattttagtttgattatttttgataagtatttaattgatatgtaattttttttttgttttaaatatgtataataggatagagtttttaaatttgatttaattattaatttttgatttataagtgttatggtgagttaatagaatttattaatgtttttattgtattttattagttaaatttagaaggttggaattagttttttttatttagtattttgttagtttgtttagtttgtatttttaattttgtttttaatggtaatttgttttattttttgaaataaaataatttatattttgggagggttaattttttattgtgttaggttgttttatgtattgtaggggtgagtgtttttaggtttaaatgttaatagaagtttttagtaaatatgataattaaaaaagtgtttttatatattttttagtattttttggaatgataggttattgtttttagttgaaagttattggtataattttggtttttaagtttttatgttatttattttaattgtttagatattaattttatttaaatttttagttatagtttggttttttgaatttgttggattagtaattatagattaaggtgttttaatagttaagataggattttggaataagagtttttaaattgtataatatttgagaggatttatgaatataaattgggttttgtttataattagttttatataatgaattttaagattgtttttttatggtgaatagaagtttggaaattattgttttggtataaagtagattattttagtagaaatatagaattattgtaatttgtgaataagattgtttttaaatatttttatttgtgtgttattttatatatagaatgtgtatgatagttttaaattttagaataaatttatttttagtatttaataaaatttgatattgtattattttaaaataaagtgtttattttaggtaggattttttaaaataaagtagtaatatttatgtagataagataaaaaagttaaaatattttatattttttaattttggagtgtaattttttttttttattgtttttgatagggttaaatttgtgtttatagtaaaaaaaaaaaaaaaaagaattattaattggtaattattaagattttatatttattatagttttttaataggtaagttgataaaatagtttttagttattaaaaaaaaaatttaaggaaaatttttaataattagttttatttttaaattgtatgaagttttttatatttgaaatttaaaaatgattttaatgattttttttattagtaatgtgttattattgaggtgggtgatggggagggaagagggaagaaatttgttagtattatttttgaatttagaaatgtttaaaaaaaagttttaaatattttgatggttagataaaatatttttattgttatgtatgggttttttttttggaaatttatgaatttgttatgtgagtttttgtaaattggtttaaaagtatatttaaggagttgataatttaagattatatgaattagaattttaatattttattaaaataagagttgaaatttttggtatttatttttagaatatttaaaaaatagattgtaaatttaatttatattaatattaaatttttttaaaattaattatattataaaagataatgattttgttattaaattaagttttaaaaaaggtggtatttttatgttttagttttatgttgttatttgagatgaaaaaaaaggtaattgttagaattttaattgtgattagtttggatggttggtatttggtatttttttataatttaaattagtaaatttgaaaatttaaattaatttttgtttttagaattaaatttttgttgagttttttaattttgtattataaagttttatggattagatttattttttttttttataaggttattttaattgggttttattttagttgtggtaatttgaaatagggtttggagatgtttatttgttaatggttgatttaaagtgtgttggttttgagttaaatatgaaaaagtttttttatagatttggttattattaaataaggatgttattttataggtaatttttttgataattgggtaggatttagtagataatttagtataaaattgttttaagtttttgattttgtatttattttaaagattagtgtttgtttgaagttttgttagttttatttttattgaaataggtgtatatttaggtttaaagttaaatggatttgaaaaaagttttaagttttttttaatgaatttgaggtttttaaaatgttttttaaattttttttggagatgatagattattatttgatatttattaggattaaatatttttttattttttttattttgttgttttagtttattaataatttttttgagggtaggaaagtttgttagatttttttttttaatatgtttttgaaataaatttagtttaattttgaaagtataaatatggttaaaggtagtagtagtaaagattttattaatttgtaattttttattgagtttttgaaggtgttttataatgtttattaagaagttaaagttataaagttattgtttgtttgagaagtggattgttgttgtttttattgaaattaagaatgtttttatttttttttttagagagaatattagttttaaagtttttttttttttaagttaattgtttagatattgtttattaatttttttattatgttttgatttagattttgttagtaaagtttgaaatttaggttgtttaatgtttttggttttaattaaaattatttatttggatatggtatttatgatttgattaatatttatattataggagtttaatagttttaagtgaagaaattttgaataatgaatgatattttaatagttggggtttatggtttttttttttatgtatgagatgagttttgagtttttattaattatttttaaagtatgggttgtggttagtttaattattttttgtaagttaagttttgttgtttgtagggattttaggattgttgatatgagtgtattaatattgaaatgatgagttaggttgattatggttagaagatttttttgtatttttaatttagggtttatattgtggataaagattaggaggtagtttttataggttataaaagtttggttgtttaaggtaagagaataggttttaaagtttttggtttggttaaaaagttggttgtgtagatttttgttaatgtttaggattttttgttttgtgatatttggagataagttaatgttttgtaggatgtttatatgtttgggtagtattttttttagtaatatttttatgtattggtatataaagttttttttattttagttgtgattttttaaggttaagaggtggtagagtttgaggtttgtatgagtagttttttttttaggagtgaaggaggttatgggtaagttgttttgatgtagatgttttattagggttgtgtgtttgttgtttgttatatattgtttgtagtatttgtgtttagttttgtagtggtgtttgatgttgtgtttgtgggtagttatgatgaggtggtgatagattaggtatagggttttattgttttttggaggttttattattaaataatgttgggtttatttgggttggaaaattagagttttgttgatttttattttgttttttttgggtgttatttatattttgtgggaggttataagagtagggttaatgttagaaaggttgtaaggggagaggaggagtttgagaagtgttaagtattttttttgttttgtgttagattattttagtagaggtatataagtttggttttggtatttttgtttttattggttggatattttgtattttttgagtttttaaaaatgaattaataggaagagtggatagtgatttttaatgtgtaagtgtatatttttttaggtagtgggtagtagttgttttagggagggatgaagagatttagtaatttatagagttgagaaatttgattggtatttaagttgtttaattaatagttgttgttgaagggtggggttggatggtgtaagttatagttgaaggaagaatgtgagtatgaggtattgaggtgattggttgaaggtatttttgttgagtatttagatgtttttttggtttttttggtgttaaaatgttgtttgtggtaggggttatttggtggttggatgagatagtggtgaattgtattgtggtgggggaagttatttagtggttagttaatgttattaaagagatgattgagaattggtatggagggagttgagttgggtttatttaagggttatgatttaatgggttgtgttatttaatggtgtggatatgtttttttgtttgggtagaggtatgtatagtgtatgtttataatggtggaggttgttgggttttttgatgtgttagttaggttttttttttttttgtagattgtgtgtttttttattgtttttttttgagattttttaagggttgtttggagtgtaagtggaggaatatatgtagtgttgttttaatggtattgttaattaagtaaggaagttatttaatttaaaattatgtatgtagaatatgtgaagttaaaagatgtataaaagtttaagatggggagaaaaatttttttttagagggtattgtgttattgtttttttgttttttatttattttagaaattatttgtttatatttaaaggtataatttattttgagttttttttaaaataaattgtttgtagttttaggataggttgatgtattttgggtttgatttttgattattttattgttaaattagtgattttttttagtgtttttttgttttttattttggaggatgtattttgaagatattagattttatgggttatttttggattttgaagtttataattgtgataaaaaatgtgaagggaagagatttgaaatatgtggaaggaaaagtgagtgtagattataaatttttaaaaagataagtttaaaatatatttaaatgttatgttagattattttgttaaaattagttgttagtgatgtttgtatgttaatagaaaaaagaatgttttagtttggagtggtaggtttttagagggatttattgtgaaagtataaattatttagggtaatgggattgagagaatagtgggtagaaaggattattgaaggaaaggaagagaattggaaggtagatgaaagaaggagtaagaatttggggatgtttttttttttttatttgtaatagtagtaatagaagtaatggtagattggtttttgtttttattgtgttagaatgaattgataggataattgggtttattattgtattgtgttagaatattgtaaaataaaattaaatatattagtttggtggtttgtaattaattatttaagtggagatttttattttttttttattttttttttagatggagttttattttgttatttaggttggagtgtagtggtgtgattttagttgattgtaattttttttttataggtttaagggagatttttttgttttagttttttgagtagttaggattataggtatgtgttattatatttggttaattttgtatttttagtagagatgggatttttttatgttggttaggttggtgttaaaatttttgattttaggtgaattgtttgttttagttttttaaagtgttgggattataggtgtgagttattgtgttttgtagttttttgtatttttaatagagatagggttttattatgttagttaggatggttttgattttttgattttaggtgatttgtttgttttggttttttaaagtgttgggattataagtatgagttattgtgtttggtttaagtggagatttttatatggagtttagttatattttttttaatatataagttgagatgattaatataattttaatataggggtttatgagaaatgtttgtaatatttaagtaatttattgtttttttttttttttttttaagatgaagttttattttgttgtttaggtggaagtgtagtggtgtgattttggtttagggtaatttttgttttttggttttaagtgatttttttgttttagttttttgagtagttgggagtataggtgtgtatgattatatttggttaatttttttatttttagtagagatggggtttttttatgttggttgggttggttttgaatttttgattttaggtgatttgtttattttagtttttttaagtgttgggattataggtgtgagtttttgtgtttagtttattattttatttttgaataaagaattgtttgtgtggggaatagataatttttttttatgtagtttttgttagaaaatttgttttttttagtagttggtttgtgtttataggttattttttgaaagtataaaaaatttattgattttttttttttgggtttttttttttttttgagatagagttttgtttttgttgtttaggttggagtgtaatggtgtgattttagtttattgtaatttttattttttgggtttaagtgatttttttgttttagttttttgagtagttgggattataggtatgtgttattatgtttggttaattttgtatttttagtataaatggggtttttttatgttggttaggttggttttaaatttttgattttaggtgatttatttgttttggttttttaaagtgttgggattatgggtgtgagttattgtgtttggttagaaaatttattgattttttaaagatttattaattttttgtattattttttttttttttttttattgtaaatataaaagggaatagtagagaaaattatttagaattttattttttagtgatattatttagtgatattttattagagttatttaggaatttgaggttgaataaagtttaggtaaaagtaaaattagttgagaagagatatttgttaaaagaaatttatttttaattttatttgttgttttttttagaggaatagaaatagtgttgaatgttttattagaaatgatggttgttttgtttgtttttttttttttttttatataatatgtaaatttatatagtgtatgagtttgtaagataaaggaaaaatatgttaatgaggtattattgtttgtatttggagtttgttattattgtttggtttatattaaaatatgtatattagagtagttgtagattgataaattattttttgtttgatttgttagt

SEQ ID NO: 255 - DNA, 8093 bp, Artificial Sequence
  chemically treated genomic DNA (Homo sapiens)
attggtaaattaaatagaaaataatttattagtttgtaattattttaatgtatatattttaatatgagttaagtaatgataataaattttaaatataaataatagtgttttattaatgtgttttttttttgttttataggtttatatattgtatgagtttatatattgtgtgagagagagggaagagatgggtagagtaattattatttttaataggatatttagtattatttttgtttttttaggaaagatagtaagtgaagttaaaaatagattttttttggtagatgtttttttttaattaattttatttttatttgaattttatttagttttaggtttttaagtgattttaataaaatgttattaaataatgttattaaaaaataaaattttgaatgattttttttattatttttttttatatttatgatggaggggaaaaaaaaaagtaatgtagaaagttaataaatttttaggaagttaatgaattttttggttaggtgtaatggtttatatttataattttagtattttgggaggttaaggtgggtggattatttgaggttaggagtttgagattagtttgattaatatggagaaattttatttgtattaaaaatataaaattagttaggtatggtgatgtatgtttgtaattttagttatttaggaggttaaggtaggagaattatttgaatttaggaggtggaggttgtggtgagttgagattgtgttattgtattttaatttgggtaataagggtaaaattttgttttaaaaaaaaaaaaaaatttaaaaaaaagaagttaataaattttttgtgtttttaaagagtagtttataagtatagattaattgttagagaaaataaattttttagtaggggttgtatgagaaagagttatttattttttatatagataattttttatttagaaataagataataggttgggtatgggggtttatatttgtaattttaatatttggggaggttgaggtgggtggattatttgaggttaggagtttaagattagtttggttaatatggagaaattttgtttttattaaaaataaaaaaattagttgggtgtggttatgtatgtttgtatttttagttatttgggaggttgaggtaggaagattgtttgaaattaggaggtagaggttgttttgagttaagattatgttattgtatttttgtttgggtaatagagtaagattttattttaaaaaaaaaagaaagaagataataagttatttaaatattatagatattttttatgagtttttgtattgaagttgtattagttattttaatttatatattaaaaagagtataattggattttatataaaaatttttatttgagttgggtgtggtggtttatgtttgtaattttagtattttgggaggttaaagtgggtagattatttgaggttaggaaattgagattattttggttaatatggtgaaattttgtttttattaaaaatataaaaaattgtagggtgtggtggtttatgtttgtaattttagtattttggaaggttgaggtaggtggtttatttgagattgagagttttgatattagtttgattaatatggagaaattttatttttattaaaaatataaaattagttaggtgtggtggtatatgtttatagttttagttatttgggaggttgaggtaggagaattttttttgaatttgtgaggaggaggttgtagttagttgagattgtgttattgtattttagtttgggtgataaagtgagattttgtttaaaaaaaaaataaaaaaaaaataaaaatttttatttaagtaattaattataagttattaagttagtatgtttagttttgttttatagtattttggtatagtataataataggtttagttgttttgttaatttattttaatatagtagaaataaaagttagtttgttattgtttttgttattattattataagtgaaaaggaaaaaatatttttaggtttttgtttttttttttatttattttttaatttttttttttttttttagtggttttttttatttattgtttttttagttttattgttttgaatagtttatatttttataataaatttttttagaaatttattattttaaattgaagtatttttttttttattaatgtatggatgttattaataattgattttaataaaataatttgatataatgtttaggtgtattttgggtttgtttttttggaagtttatagtttgtatttatttttttttttatatgttttaaattttttttttttatattttttgttatagttataagttttaaaatttaaggatgatttataaaatttggtatttttgaagtgtgttttttgaaataaaggataggaaaatattaagaggggttattaatttaataatagggtaattagaagttaagtttaaagtgtattagtttgttttaaaattataaatgatttgttttgaaagaaatttaaaatgaattgtgtttttggatgtgaatagatgatttttggaatgaatgaaaagtaagaaaatagtaatatagtattttttgaaaaaaggtttttttttttattttaagtttttatatattttttaattttgtatgttttgtatatataattttaaattaagtggtttttttatttagttaatggtattattaagataatattatgtatatttttttatttatattttaaataatttttaaaaggttttgggggagagtggtaaagaaatatatggtttgtggaaaaggagaaggtttgattggtatgttagggaatttggtggtttttgttgttgtgggtatgtgttgtatatgtttttgtttgggtaaagaggtgtgtttgtgttattgagtgatgtggtttgttaagttgtagtttttaagtgagtttggtttgattttttttgtattagtttttaattatttttttgatagtattagttggttgttggataattttttttgttgtgatgtggtttattattgttttgtttagttgttgaataatttttgttatgaatgatattttggtgttagaagagttaaggaaatgtttagatgtttaatggaagtgtttttagttaattattttagtgttttgtgtttatgttttttttttagttgtagtttatgttatttagttttattttttagtggtagttattgattggatagtttgaatgttagttaaattttttaattttgtgggttgttgggtttttttgtttttttttgaagtggttattgtttgttatttagaaggatatgtgtttgtgtgttagagattgttgtttgttttttttattggtttgtttttaggagtttggggaatatgaaatatttagttaataggagtagagatgttggaattgggtttgtgtgtttttgttgaggtgatttggtgtagagtggaggaggtgtttggtgttttttaggttttttttttttttttgtggtttttttaatgttggttttgtttttgtggttttttgtagaatgtggatgatgtttaaaagaagtaagatggaagttgatgaggttttagttttttggtttgagtggatttagtgttatttggtggtggagtttttggagggtgatggggttttgtgtttggtttgttgttgttttattgtagttatttgtgaatgtgatgttaggtgttattatgaggttgagtatgaatattatgagtggtatgtggtggatggtgagtgtgtggttttggtggagtgtttgtgttagggtgatttgtttgtggttttttttatttttgaagagagagttgtttgtgtaggttttgggttttgttgttttttggttttgaagggttgtggttggggtgagggggattttgtatattagtgtatggaggtgttgttgagagaggtattgtttgagtatgtaagtgttttgtaaggtgttgatttatttttagatattataaggtagaggattttgagtattgataggaatttatgtaattagttttttaattgagttagggattttaaagtttatttttttgttttggatgattaggtttttgtggtttatgagaattattttttggtttttatttgtggtgtaggttttgagttggaggtgtaagaagattttttgattataattaatttgatttattattttagtgttggtgtgtttatgttggtaattttagagtttttgtagatagtagggtttagtttgtagagaatggttggattgattatgatttatattttgaggatgattggtgagaatttaggatttgttttatatatgagagaaaaggttgtaagttttaattgttggaatgttatttattatttaggatttttttatttggaattgttgagtttttatgatgtagatgttaattagattataaatattatatttgaatggatagttttgattaagattagaggtgttaggtgatttgaattttagattttattaatggaatttgaattagagtatggtgaaagggttaatggatgatgtttgaataattggtttaggagagggaaaattttaaaattaatattttttttaagaaaagaaatggaagtgtttttggttttagtaggggtaataatagtttattttttagataaataatggttttgtgattttggttttttggtggatattatggaatatttttgagaatttagtgaagaattatgagttagtaaagtttttgttgttgttgtttttgattatatttgtatttttgaagttaagttgaatttattttaaagatatattgaggaaaaaaatttaatagatttttttgtttttagagaagttgttgatgagttaaaatagtaaaataaggaagatgaaaaaatatttgattttgataggtattaaatggtgatttgttgtttttaaaaagaatttgagagatattttaaggattttaggtttattaaaaaggatttagaattttttttaaatttatttaattttaaatttgaatatgtatttattttagtgagggtggagttaataaaattttaggtaaatattaatttttggaatgaatatagaattaaagatttggggtagttttatgttggattgtttgttgaattttatttaattattaaaggggttgtttgtaaggtggtatttttgtttgatagtaattaaatttgtgaaaaggtttttttatatttgatttgaaattaatatattttgagttagttattaatagatgagtatttttaagttttgttttgggttgttataattgaaatggagtttggttgggatgattttgtgagagaaagaaatgaatttaatttataaggttttgtagtataagattgaaaaatttaataagaatttaattttaaaagtaaaaattggtttgagtttttaagtttattaatttggattgtgagaaagtattaagtattagttgtttaaattgattataattaaaattttgatagttgtttttttttttattttaaatggtagtatgggattgaaatatgagaatgttattttttttaaaatttagtttagtgataaagttattgttttttatgatatagttaattttaaagagatttagtattaatgtgagttgaatttgtagtttgttttttaggtgttttgaagataaatgttaaaaattttagtttttattttaatggagtgttaaaattttgatttatatagttttaaattattaattttttaaatgtgtttttgaattaatttgtagaagtttatatagtaagtttataagtttttaaaaaggaagtttatatataatagtggaggtgttttgtttaattattaaaatgtttgagatttttttttaaatatttttgagtttgaaggtaatattgatagatttttttttttttttttttttattatttattttagtgataatatattattgatagaggaagttattagaattatttttaagttttagatataggagattttatgtaatttggagataagattaattattgggggttttttttggattttttttttaataattgggggttattttattagtttgtttattaaaggattatggtaagtatagaattttaatggttgttagttagtaattttttttttttttttttttattgtagatataagtttggttttattaaaaatgatgaggaaaaaagattgtattttaggattaggaggtgtgagatattttagtttttttgttttatttgtgtgggtattgttgttttattttaaaaaattttgtttaaagtaaatattttgttttaaaatgatatagtattagattttgttagatgttagaaatggatttattttaaaatttggaattgttgtatatattttatatgtaagatagtatataagtagaaatatttaaaagtagttttatttatagattgtagtaattttgtatttttattaagataatttgttttgtgttaaaatagtaatttttaaatttttgtttattatgaaaaggtaattttaaagtttattatgtaaaattaattataaataggatttaatttatatttatagatttttttaagtattatataatttaaaaatttttgttttaaagttttgttttaattattgaaatattttaatttgtggttattaatttagtaaatttaaggaattaggttatgattaagaatttaggtggaattgatgtttgggtaattaaaataaatggtataagagtttaaaaattaaagttgtgttagtggtttttaattagaggtagtaatttgttattttagaggatgttgagaaatgtgtaggggtatttttttggttgttatatttattaggggtttttgttggtatttaagtttaaagatatttatttttgtagtgtatgggatagtttggtataatgaagaattagtttttttaaaatgtagattattttattttaagggatagggtagattattattagaagtaaaattaaaagtataagttgggtaaattgatagaatattagataggagagattaattttaattttttaaatttggttagtaaagtgtaataaaggtattgataagttttgttagtttattatagtatttgtaaattaggaattaataattgaattagatttaagggttttgttttgttatatatatttaaggtagaaaaaaagttatatgttgattaggtatttattaagaatggttaagttgagattttggttaatagagtaagtttatatatttagagaaataatatagtggaaaattgaaaaaaaaaaatagaaaaatttattggtaattttttaatagttttgaatatttatagtagagttttattatttgagagaaagattggaagatttgaaagttatttttgttttttaattttagttttttaaatattgaaattttgtatattttgtgaaattttagtatgttttgtttaaggtgttaataaaattagtttgtattatgtagttattgagtgagggggagatataagttaaggattttaaattgatttttagttatagagaatttgttataagttagttttgtttgtaaaaaaaaaaaaaaaaaaagaaaaagaaaaaagtgtattttattgttttttgtattaagtaattttgtaattgtatggtagtttttttttttttaaataaatatagttgttattggttttgttgtagtagtgaatatagttaaaatatgtatattaaaaaaaaaattattaggtttttattagttattgttttatagtttatttttattagtttttttgatagatttgtatttttagtgttttgtattgttatttaaattgttttattatgttaagtttttgttaatagttttattttttttgaaatatttgaatatttgatgattttagttttgaggagatattatttttaggtgtgtttttttagtttttgtaggtattttttttttttaatatttgttttttgtatttttaaaaaaatttgttttagattgttttgttttgtgttagtttgttagttgattttatttttttttatgg

SEQ ID NO: 256 - DNA, 6521 bp, Artificial Sequence
  chemically treated genomic DNA (Homo sapiens)
ataaaattatgtatgggtaaaagatttaattaggtgtagtttagaaaaatggattttttttttttttttgagatagagttttgttttgttatttaagttggagtgtagtggtgtaattttggttaattgtaatttttgttttgtaggtttaagtgatttttttgttttagttttttgagtggttgggattataggtgtgtgttattattatatttgattaatttttgtagttttagtagagatgggagggttttattatgttggttaggttgtttttaaatttttgattttaggtgatttatttattttagtattttaaagtgttgggattataggtgtgagttattatgtttagatttaaattttttttgttttttttttttttttgggggtggggggtagggttttattttgttgtttaggttggagtgtagaggtttgattttggtttattgaaatttttattttttaggtttaagtaatttttttattttagttttttgagtagttgggattataggtgtgtattattatatttggttaattttttgtatttttggtaaagatggggttttgttatgttgtttaagttgtttttgaatttttgggtttaagtgatttttttgttttatttttttaatgtgttggaattgtaggtatgagttattatgtttggaataaagttttattttttaagtggattatttaaaaaaatgttttatggttaggtatgttatttttttttagtttgggtaagtgagttgagattgtgttattgtggtttggtttgagtgatagagggagattttattttagataaataaataaataaaattaaaataaatttaaatattttttatatgataaaattatttttaatggtaattataaaatgaataataagggttaagaaataaatttagtgaatattttttttttttgaattttgtaaatataattatgttagtataaaaatagttatgtattgtttaataatagggatatgttttgagaaatgagttattaggtaattttgttattgtgtaaatattatagagtgtatttttataaatttagatggtgtagtttattatttatttaggttatatggtatagtttggtgtttttaggttttaatgtttatagtatgttattatattgaatattgtaggtagttgtaagataatggtatttgtgtatttattgtagagatagggtttttttgtttgttgtttaggttggagtgtagtggtataattatagttttttgtagtttttaatttttgggtttaagtgatttttttattttagttttttaagtagttaggattatatgtttgtgttattaggtttgtttattgtttttgtttgttttttggtagagatggagggttttattatattgtttagattggttttgaatttttggttttaagtaatttttttgttgttttggtttttaaagtgttggtattataggaatgagttaaaagtttaatatggttgttgaataaaagattgatttaattaagtatggattttgtttttatggagttgaaggttgttagagtagataaaatgagttattatttttatatgagttagatggtggataaagttattattgagggtaggtaaagaattgggttggtttaaagatgttagggattttttttagattagtggtagagggttggttaaggagttttttgaaggaggtggttttttatttgagttttaaagaatagaagagattagatagggaggatagtaaaatttttttttttttttgaaatagttttgttttgttgtttaggttggagtgtagtggtgtgattttggtttattataagttttgttttttgggtttatgttatttttttgttttagttttttgagtagttgggattataggtggttgttattatgtttggttaatttttttttttttttttttttagtagagatggggttttattatgttagtgatgatttttgtttgtttgtttgtttttgagatagagttttattttgttgattaggttggagtgtagtggtgtgattttggtttattgtaatttttgttttttaggtttaagtgatttttttgttttagttttttgagtagttgagattataggtgtttgttattatgtttagttaatttttgtatttttagtagagatggggttttattatgttggttaggttggttttgaatttttgattttaggtgatttgtatattttggttttttaaagtgttggtattagaggtatgagttattgtatttggttagtaaaattatttgtgatatagtagtaagtgtataagtattgatttattagagttgaaggtggttgaggtatttaagtgggtttttggggattttgttatgttagggaatatttttttagataagggattaggaggtttggagggtttttaaggaagagttagggtagtaggggtattttggagttaggggttatggttatatgttaataggattagaaatattttaatgtatttaattaatttatataattatattggtgggtgtttattgaatattagttttagatatggatttgaaatggttttatttttttttagtttgtttaagttaatggagttttattagaatgtgagttataaaatagtagagttattttttatttaatgttgtatttgtagggtttagaatagtatttgaaggattggtggaggtttaataaattgttaaaagggtagattagttaggtgtgatggtgtgtgtttgtagttttagttatttgggaggttgaggtaggaggattatttgattttaggatttttgggttgtagtgtagtatattagttaggtgtttgtattaagttttgtattaatttggttgtttaaggatggttgaattgatttaggtggaaattggagtaggttaaaatttaatgttgattagtaatagggttgtatttgtaaatagttattgttttttagtttgggtaatatagtgagattttatttttaaaataaattttaaaaataattaattagaaaaaaaaattagtttgtaattttagtattttgggaggttaaggtgggtagattatttgaggttaggagtttaagataagtttggttaatatggtaaaattttaatttttattaaaaatataaaaattagttgggtgtggtggtaggtgtttgtagttttagttatttaggaggttgaggtaagagaattgtttgaatttgggaggtggagattgtagtgggttgagattgtgttattttattttagtttgggtagtagagtgtgattttgttttaaaaaaaaaaaaaaagaaagaaaagaaaagaaaaagaaaagaaaagaaaaaaattgggaggtttaagtttatttttggtgtttttatatttttttgttttatttttttgtatttagtttttttttgtaatttgtgttttatattagtttttaagtttttaatgtgatttagtatgagaattggattttgttatttttttgtttataatattttatgttttttttttgtttagaatattattttttttattgtttttattaatggaattggtatttttttaaggatatgattaaatttgtttatttttatattattttttaaagtagaatttatttttttttttttaatatgatgatattgatagggtttgtttttatttattagattgtgagttgtttagggtaggtagtgttttttgtttttgtttttgttttttttttttgagatagggttttgttttgttatttaggttagagtgtaatggtatagttttagtttattgtagttttaattgttttggtttaaattattattttattttagttttttgagtagttgggattataggtatatgttattatatttggttaatttttttgtatttttagtagagatagggtttggttatgttgtttgggttggttttgaatttttggatttaagtaatttatttattttagttttttaaaatgagggattgtgttttatttatttttatgtttttagtttatagtttagtgttggatttatggtagtattaaataaatatttgttgaatgtaatagtaaatagtattttagggagtaagaattagattaataaaggtggtaaaaggtttggagaaaaaaataatagtttaatttggttagagtatgagggagagtagtaggagataagatggaaaggttttttgggtaaggttttgaaggaagttggaagttagaagtatataatgtgtatattgtggtaggtagtggggagttaatgaaggtttttgagtaggagagtaatgtgttgaaaaataaatataggttaaatttattagagtttttttgatatatatatttgttttttatttaagtttaagtttgttttttatatatttattatttaatttatttttgggtttttttagtagtttgttttatttttttatttgttttttggtggagttagggatgtatatatgagttgtttttttttttagttagaggatatgggggttttagtttttttgtttttttttttttgtgtttggagttgggaagtaggttagggttagttgaggttggttggtaagtagttgggtggtgttagggagagtttgtatagtgttaggtggtgttttgggttttaagttgagtttatggttttgataattttttgtttgtgtatatatttgttttttattttatttttattttagttttggtatgggggagagggtatagggttagataaatttgtgagattttggttttatttttgtaaaagggtgttttgtgagttagtttgtttttttttaggtttgttttttttttatttagtttttgtttttaatgtatgtatagtttgtatatattgtgtgttgggatattttatagttagttgtatggtttttttgtgttttagtttttggttttttttgttgattttggtttttgttttaggttttattgtgtaattgttgttgttattgttgtttttggtgtttgtttatttttagaggttgttttggatgtaggaggatttttttttgggaggaggtttttttggggaagatgatttattgggtgaggaggatttgtttagtgaagaggatttatttagagaggaggatttatttggagaggaggatttatttggagaggaggatttatttggagaggaggatttatttgaagttaagtttaaattagaagaagagggttttttgaagttagaggatttatttattgttgaggtttttggagatttttaagaattttagaataatgtttatagggataaagaaggtaagtggttattaatttttaaatttaggttttaggaggtttatgattttttttttatattttagtttaggttttgtttatttagggaaggaggggagattgtattttttatagaagtttttttagaggttttatattaatatttttatttttatttttggaggtagaaagggatagatgtggagagaaaataaaaagggtgtaaaaggagagaggtgagttggatgagatgggagagaagggggaggttggagaagagaaagggatgagaattgtagatgagagaaaaaatgtgtagatagaggaaaaaaataggtggagaaggagagttagagagtttgaggggaagagaaaaggaaagtttgggaggtgaagtgggtattagagataagtaagaagagttggtagaagttattttattttaggttataatgaggaaattgagatttaggaagaagggatatagtaggtagagaaatgtggttttttgatttttaagttaggaatttggggaaaggggttggagattatataaggtagagggatgagtggggagaagaaagaagggagaaaggaaagatggtgtatttatttatttgggatttaggattgaagtgtttatttattttttttttttttttttttgagataaatttttatttttgttgtttaggttggagtgtaatggtgtgattttggtttattgtaatttttattttttgggtttaagtgatttttttgttttagtttttagttaagtagttgtgattataggtatgtgttattatgtttggttaatttttgtatttttagtagagatggggttttgttatgttggttaggttggttttgaatttttgattttaggtgatttaattattttggttttttaaagtgttgggattataggtgtgagttatagtgtttggtttgaagtagttatttatttttatagattttaagataatgattgtaagttggtaggattgttgtttggtttatttagttgtggtgttgagtttgggtgtggttttttgtgttttgtatttggtttgtttaaggtatttgttatttgtaatgtttttgtaaggtatttgtgtttgtgatattgttttggttgttaggaagggattggggttttaagtttgagtggtttattttttttatttatatagg

SEQ ID NO: 257 - DNA, 6521 bp, Artificial Sequence
  chemically treated genomic DNA (Homo sapiens)
tttgtataaatgaaaaggatgaattgtttaagtttagagttttaatttttttttggtgattaaaatgatgttataaatgtagatgttttataggagtattatgggtaataaatgttttaagtgggttaggtgtaaagtataggagattgtatttaaatttaatattgtagttgggtgggttaaatagtaattttattagtttgtaattattgttttagggtttgtaaaagtgagtggttgttttaggttaggtgttgtggtttatgtttataattttagtattttgggaggttagggtggttggattatttgagattaggagtttgagattagtttgattaatatggtgaaattttgtttttattaaaaatataaaaattagttgggtgtggtggtgtatgtttgtaattgtagttatttggttagaggttgaggtaggagaattatttgaatttgggaggtggaggttgtagtgagttgagattgtgttattgtattttagtttgggtaataaaagtgaaagtttgttttaaaaaaaaaaaaaaaaaaagtgagtgggtattttagttttgagttttaaatgagtgagtatattattttttttttttttttttttttttttttttatttatttttttgttttgtatggtttttaatttttttttttaaatttttggtttgggagttaagaagttatgtttttttatttgttgtgttttttttttttaggttttaatttttttattgtagtttaagatgagatgatttttattagttttttttgtttgtttttggtatttattttattttttaagtttttttttttttttttttttaaattttttgattttttttttttatttattttttttttttgtttgtatatttttttttttatttgtagtttttattttttttttttttttagtttttttttttttttttattttatttagtttatttttttttttttgtattttttttattttttttttatatttgtttttttttatttttgagagtggggatggggatattggtatgggatttttggaagggtttttgtggggagtatagttttttttttttttttgagtgaatagagtttaggttggggtatgggaggggagttatgaattttttggaatttggatttggagattgatgattatttattttttttgtttttgtgggtattattttggggtttttgaggatttttaggagttttaatagtaggtagattttttaattttagggagttttttttttttgatttaggtttaattttaggtagatttttttttttaggtagatttttttttttaggtagatttttttttttgggtggatttttttttttgggtgaattttttttattgggtagattttttttgtttagtgggttattttttttagaagagtttttttttaagggggaatttttttgtatttggggtaatttttggggatggataggtattagaagtagtagtgatagtagtagttgtatagtgaggtttggagtaggggttgggattaatagagggagttaggggttggggtataggggagttatgtggttgattgtggggtgttttagtatatggtgtgtatgggttgtatgtgtattggaaatgagagttgggtgggggaggagtaagtttggaggggagtaggttgatttatagagtgtttttttgtagagatggagttaaagttttataggtttgtttggttttgtgtttttttttttatattaaagttaggatgggggtggagtgaggggtaggtgtgtgtataggtagaaggttattggggttatggatttagtttggaatttaaggtattatttggtattatgtaggttttttttggtattatttagttgtttgttagttagttttagttaattttggtttgttttttagttttaggtatagaaggggaaaggtaggggagttggggtttttatgttttttggttgagagggaaagtagtttatgtatatatttttgattttattaggaagtaggtaaagaggtagggtaggttgttaggggagtttgagggtgagttaagtaatgggtatgtgggagataaatttgagtttgaatgaaaagtaagtgtatgtgttagaggggttttgataggtttaatttatatttattttttaatatattatttttttgtttaaaagtttttattggttttttattgtttgttatgatatgtatattgtgtatttttgatttttaattttttttaaaattttgtttaagagatttttttattttgttttttattatttttttttatattttagttaaattaaattattatttttttttttaaattttttattatttttgttaatttagtttttgttttttgaaatgttatttattattgtatttaataaatatttatttagtattattataggtttagtattgggttatggattagggatatggaaatgaataagatatggttttttattttgggaggttgaggtgggtggattgtttgagtttaggagtttgagattagtttgggtaatatggttaaattttgtttttattagaaatataaaaaaattagttaggtgtaatggtatgtgtttgtagttttagttatttaggaggttgaaatgggatgatggtttgagttgaggtggttgaggttgtagtgagttgagattgtattattgtattttggtttgggtgatagagtaagattttgttttaaaaaagaaaaataaaaataaaaataaaaaatgttatttgttttgagtagtttataatttagtgagtgagggtaaattttgttaatattattatattgagggaagagagatgaattttgttttagaagataatatagaagtaggtaaatttgattatgtttttgaagaaatattagttttattggtaaaaataatagggagaatgatattttgggtaaagggaaggtataaaatattatgagtaggagagtgatagaatttagtttttatattaggttatgttgagggtttgagggttagtatggagtatagattgtaggggaagattgggtgtaaggagatggggtagaagagtgtgaggatattaagaatgggtttaggttttttagtttttttttttttttttttttttttttttttttttttttttttttttttttttgagatagagttgtattttgttatttaggttggagtgaagtggtgtgattttggtttattgtaatttttattttttaggtttaagtgatttttttgttttagttttttgggtagttgggattataggtatttgttattatgtttagttaatttttgtatttttggtagagattggggttttgttatgttggttaggtttgttttgaatttttgattttaggtgatttgtttgttttggttttttaaagtgttgggattataggttggtttttttttttaattaattatttttaaaatttattttagagatgggattttattgtgttgtttaggttggagggtggtggttatttataggtgtgattttgttattgattagtattgagttttgatttgttttaatttttatttgggttagtttaattatttttaggtaattaggttgatgtagaatttagtgtagatatttgattggtatattatattatagtttagaaattttgggattaagtgatttttttgttttagttttttaagtagttgggattataggtatatgttattatatttggttagtttgtttttttaataatttattaagtttttgttagttttttaggtgttgttttaggttttatagatgtagtattgaatagagaatagttttattgttttgtagtttatattttagtaaggttttattggtttaaataaattaaaagagaataaggttattttaggtttatatttagggttaatatttagtaggtatttattaatatggttgtgtaggttaattaaatatattaagatatttttaattttgttggtatatagttatggtttttagttttagggtatttttgttattttagtttttttttagggattttttagattttttgattttttatttaaagaggtattttttggtataatagagtttttaggagtttatttgagtgttttagttatttttaattttgataggttagtgtttgtgtatttgttgttgtgttataaatagttttattggttaggtgtagtggtttatgtttttaatattagtattttgggaggttgaggtgtgtagattatttgaggttaggagtttgagattagtttggttaatatggtgaaattttgtttttattaaaaatataaaaattagttgggtatggtggtaggtatttgtaattttagttatttaggaggttgaggtaggagaattatttgaatttgggaggtagaggttgtagtgagttgagattgtgttattgtattttagtttgattgatagagtgagattttgttttaaaaataaataaatagataaaaattgttgttaatatagtgaaattttgtttttattgaaaaaaaaaaaaaaaaaaaattagttgggtgtggtggtggttgtttgtagttttagttatttaggaggttgaggtaggagaatggtgtgaatttaggaggtaaagtttgtagtaagttaagattgtgttattgtattttagtttgggtgataaagtgagattgttttaaaaaaaaaaaaaaattttattgttttttttgtttaattttttttgttttttgaaatttagatgaaaggttattttttttaggaaattttttaattaattttttattattagtttggaaaagatttttggtatttttgagttaatttagttttttgtttgtttttaataataattttgtttattgtttaatttatataagggtgataatttattttatttgttttaatggtttttagttttataagggtagggtttgtatttgattgagttagttttttatttaatagttatattgagtttttggtttatttttgtaatattagtattttggaggttaaggtagtaggaggattgtttgaggttaggagtttaaaattagtttgagtaatatagtgagattttttatttttattaaaaaataaataaaaatagtagataggtttgatgatataagtgtgtagttttagttatttgggagattgaggtgggaggattatttgagtttaggagttggaggttgtagggagttatgattatgttattgtattttagtttgggtgatagatggagagattttgtttttatagtagatgtataaatattattgttttataattgtttatagtatttagtatggtaatatgttgtaagtattggggtttaggagtattaggttatattatgtagtttagatgggtaataggttatattatttaggtttgtgaaaatatattttatgatgtttgtataatgataaaattgtttagtgatttattttttagaatatatttttgttgttaagtaatgtatggttgtttttatgttgatatgattatatttataaagtttaaggaaagaaaatatttattgagtttattttttggtttttattatttattttataattgttattgagaataattttgttatataaagaatgtttaaatttgttttaattttatttatttatttatttgagatggagtttttttttgttgtttagattagattgtagtggtataattttggtttatttgtttaggttggagagaagtggtgtgtttggttataaagtatttttttaaatgatttatttgaaaaataaaattttgttttaggtatggtggtttatgtttgtaattttagtatgttgggagggtgaggtaagaggattgtttgagtttaggagtttaagaatagtttgggtaatatggtaaaattttgtttttattaaaaatataaaaaattagttaggtgtgatggtgtatgtttgtggttttagttatttgagaggttgaggtgggaggattgtttgagtttaggaggtagaggttttagtgagttaagattaagtttttgtattttagtttgggtaatagagtgagattttgttttttatttttaaaaaaagaaagaaaataagaaaaatttgggtttgggtatggtggtttatgtttgtaattttagtattttgggatgttgaggtgggtggattatttgaggttaggagtttgagagtagtttggttaatatggtgaaatttttttgtttttattaaaattataaaaattagttaggtgtggtggtggtatatgtttgtaattttagttatttgggaggttgaggtaggggaattatttgaatttgtgaggtgaaggttgtagttagttgagattgtattattgtattttagtttgggtgatagagtaagattttgttttaaaaaaaaaaaaaaaatttgtttttttgaattgtatttgattggattttttatttatgtataattttgt

SEQ ID NO: 258 - DNA, 2891 bp, Artificial Sequence
  chemically treated genomic DNA (Homo sapiens)
  unsure (223, 366): unknown base
ttttttttttttgaattgtttttttttttggaggtggtggagggagagaaaagtttatttaaaatgtttttgggtgagggattaaggatgagaagaatgttttttgttttttatgttgtggaataatataaaataaaaaattttgagggaatatatattatatattaaatatagattattttagggagtaaataaattatgtgtggggttgggtaattagttnaagttgaagtgtaaataaaatgtgaatatatgtttgtgggttatatatagtgtatttttattagtatttagaaaaaattgtgagttagtgaattaggaaattaatgtttggaaggtagttaaattttaattagtttaagattnttttttttttttaaaaaaaggtatggaagtaatatttttttttttttttttgattagaattgatgtattttttgtgtatgattgtatttttaataataaaaggggaaagaggatttggaaaggaattaaatgtttggtttgtttggggaggaaagagttaatggttttttttataagggtttttgttgatttttttggtttggtttataagttttttatttgttttttttaggaagtttggttttgtggtttgggtattttttgttttttttatatttttttgtttagtatttttgattttttttaaatttggtagtttgagattgttgtaaattggtgttatagggtgtaaaggggatttgttttttttgaaatttggttgagaaattgggaattttgtgtgggaggtgtgggggtgggatggtggggtatagattggtagagagtaggtaattttttttttgttttagtttagttttggaataggtagatatattttagggttaaatagatgttttttgtatggggttttatggaagtttgagtaggtggggtaggagggttggtatttgttgttttggtagtaaattgggggatttagtttgggtggaaggtatttaatttagatagttgtgtatatataatgtataatatatgattttttttaataaatgtaatgggagtttatttataatgtgttttttaagtatatgtggtaatgtgttgttgggttattttaattattttaggtattgtttttttttttatgtttttattatttttttttatttatattaatattttatgttttgaatgtgtgtttattaatattttttttttttttattttttttgggatttttgattaaagtgtggttttttttttagttttagtgaggtgttttgtagtttggtatgtgtgtggtgtggtggtgggtgtgtagtgtgtttttggtgtggagggtagttgttttgtttgtgatgatttatatttataggataaggatgtggtttgttaaatagtattgttatggaggagtagtagagaaagggagagggtttgagagggagtaaaagaaaatggtaggtgtgtgtagttaatttatgtggtttttttattttgtttatattttagagttagagtgtttggttgtttggttgagttttttttttattttttttattttttttattttttttataagtgttttttttgggtttttaaagtagagggtgtgggggaaaagaaaaaagatttttttttgttaatttttgtttattggttttttataatgtgagggtttggatggttgaggatttttgagttgtgttgtttgtggttgttattgttgggttttggttgtttttggttttttttttgttttgagaagggtagggttttttagaggtttggtgggaaaaagaatggagggagggattgtgttgagtataaaagttggtttttggggttttatttaatttgttgtagtaattttagtgagaggtagagggagtgagtgggtggttggttagggtggaagagttgggtgagtagagttgtgttgtgggtgttttgggaagggagatttggagtgaatagggggttttgtttttggtttagtttttttgttgattttttaattagtggtttgtaatttttgttgtatttatgaaattttgtttatagtagtgggtggatattttgtattggaatttataatatttgagtaaagatgtgatttttttgatgtggggaggttattttgtttatttggggatatttttttgttgttgttaggatttgtttttttgaaaggttttttttgtagttgtttagatgttggattttttttgggtggaaaattaggtaagtattgaagtttatttgttttttaatttatttttttattattttaatgttgagatgagttgaatgtttaaatagggtgtttttttttttatttttgtgttattgatattttttttagagtagttatggtaattggggttggggtggggggtaatttagaattggattggggtaaagtgatttgttaagatggtagaggagaaggtagagggaaaatgggaatggtttttaagattatttttttgagatttttgttttatgaatatatttatgttgatttttggttggttggatatttttgttttattgtgttaattgttttttgtgttttggggggttgggggttgttttgtggtgggtagaaagttttttgtattttgagttttttggagtagggattgtatattgtttgtgtgagttagattgttttgtagttgttgatttgtttttgtttttgggagggtatttaaattttggtttattgtatttttgatagttggagatggatattgtggtgtgttttgtttgtttgtttttgtggtgattgtaatttgttttgatttttttaagaagttggtatttggttttttaaaaaataataatataatttaaaatttgggtttttagaggtgttaggatgtggtgttgggtaggtg

SEQ ID NO: 259 - DNA, 2891 bp, Artificial Sequence
  chemically treated genomic DNA (Homo sapiens)
  unsure (2526, 2669): unknown base
tgtttatttaatattatgttttaatatttttagagatttaggttttaaattgtattattgttttttaaaaagttaaatgttaattttttaaaaggattagggtgggttgtaattgttgtggggataggtgggtgggatgtgttgtagtgtttgtttttggttgttagaaatgtggtgagttgaaatttaaatgtttttttggagatggggataagttagtggttgtggagtgatttggtttatataggtgatatgtggtttttattttaaggagtttaggatgtaaggggttttttgtttattgtaaagtaatttttagttttttaaaatgtagagagtaattaatataataaagtaggaatgtttgattggttgggagttagtgtgaatatatttataaggtagaaattttgaaagggtagttttaaaaattatttttgttttttttttgtttttttttttgttattttgataagttattttattttgatttagttttggattattttttattttagttttaattattataattattttgagaaaagtgttaatagtgtaggaatgggagaaaagatattttatttaggtatttgatttattttagtattaaagtgataaaaaaataaattaaaaggtaagtggattttggtgtttatttggttttttatttgaaaaaaatttagtgtttaagtagttgtaaggagagttttttagagaagtgggttttggtagtggtggggaagtgtttttaaatgggtagaatagtttttttgtgttgggagagttgtgtttttgtttgggtgttgtaagttttagtgtaaagtgtttgtttgttgttatggataaagttttgtggatgtgataagggttgtggattgttggttgggggattagtgggagggttgggttagaggtgaagttttttatttgttttggatttttttttttaggatgtttatagtgtagttttgtttgtttggtttttttattttagttggttgtttgtttgttttttttgttttttgttggaattattatagtgagttagataaagttttgaaaattggtttttatatttagtgtgatttttttttttgtttttttttttgttaagtttttgagaagttttgttttttttgaggtaggaggggagttagggatggttggggtttggtggtggtggttgtgagtagtatagtttgggggtttttagttgtttagatttttgtattataaagggttggtgggtggagattagtgagagaggattttttttttttttttttatgttttttgttttgggaatttgggaggggtgtttatggggagggtggggagggtggggaaggtggggaggagatttagttgggtagttgagtattttagttttaggatgtaaatagagtaagagagttgtatgaattaattatgtgtgtttattatttttttttgtttttttttaaattttttttttttttttgttgtttttttgtagtagtattgtttgataaattgtatttttgttttgtgagtataaattattgtaggtggaatagttgttttttatattgagaatgtattgtgtgtttattgttatgttatgtgtgtattaggttgtagggtgttttgttaaggttggggaaagggttgtgttttgattaagagttttagggagagtggaggaaagaagggtattaatgggtgtgtgtttagagtgtgggatgttagtgtagatagggaggaatgatagaggtataaggaggaaaatgatgtttagaatgattaaaataatttagtaatgtattgttatgtatatttggagagtgtgttatgaataaatttttattgtatttgttggggggagttatgtattatgtattatgtatgtatagttatttggattggatattttttatttagattgagttttttaatttgttgttaaagtagtagatattggtttttttgttttgtttgtttaggtttttgtggggttttgtgtgggaggtgtttgtttagttttgagatgtgtttgtttgttttagagttgggttagggtgagagggaggttgtttgttttttgttagtttgtattttattgttttatttttatgttttttatatggagtttttaattttttagttaggttttagaagagataaattttttttgtgttttgtggtgttggtttgtaatagttttgggttgttgggtttgggagaaattaaaggtgttagatgggagaatatgggaggggtagggggtatttgaattgtgggattggattttttaaaaggggtaagtggagagtttgtggattgagttgggggagttagtagagatttttgtgaaaaaaattgttaatttttttttttttggataaattggatgtttaatttttttttaggttttttttttttttttattattggaaatgtggttatgtataaaaaatgtattgattttgattaaagaagaggagaggagtattatttttgtgtttttttttggggggggggggnagttttgagttaattaaaatttggttgttttttaggtattaattttttagtttattgatttataattttttttgaatattagtgaaagtgtattgtatgtaatttgtaaatgtgtatttatattttatttatgttttgatttnagttagttgtttagttttatatatgatttgtttgttttttgaaatgatttatatttaatatataatgtatatttttttgggattttttattttgtgttattttatggtatgaaaaataaaaaatattttttttatttttggttttttatttaaaggtattttaagtaaatttttttttttttttattatttttaaaagagaaaataatttgggggaaagggg

SEQ ID NO: 260 - DNA, 1092 bp, Artificial Sequence
  chemically treated genomic DNA (Homo sapiens)
aagttttttttttattatttaagaaggtatttaggtttttttgtgttaggttttaggtaaagtgttggattatttagtaattgggtttagtagtaggatggttttagattgaggttttagggttaaaggattatttttttttttagtgttggtttgggaaaggtaagttttgggtgggagtgtatgttgtgtttttgaagtttggtttttttgttatgtttattttttgtttttattttgtgtttttttaggtttttttttggtgaattggatgttttgttagttttttattttgtgtttttggttgtggtttgggttttttgtaaagttgttgttattttggagggtttagttagtgggtttttggaggttggttgggtaggtgtggtgtgtggtaggagttgggtgtgtatggttattgtgtgtggaggagatattgttttgttgtgatgggggtttggggtgtttttttatgttgtaggtaagtggggtggtggttgtggtatttgtttattgggagttttttttttttttttttgttgttgttgttttgtatttagtttgggggaggatagaagaaaaaggaggtagaatggatttttttggtttttttttgtggttgggggtgggttagggtgggttgtgttgtttaggtagttttgttgtgttgttaggtagtttggttgttggtgtgggtgatgttggtgttggggtgggagttgtgagggtgggaggttttggggtgtttttgggatgtggagttagtagggttttgatttgaaaaatgatggtaaagtgtgtttttgattgtttttgagtattttatattttttagatttagggtgtttttatttttagttggaagtttagtttagagtaatggtgttattaaaaggggtgtgttggatgtgaaaatattttttggaagtatttataagtttgtaggaaatatgttttttttatttttttattttgttttttttattatttattttaagaagtaatagaatttgtgtagagtgtgttttaagttatattgtatgtttatttttgtttatgttgaatttggtgtatatttgtgagaataagttt

SEQ ID NO: 261 - DNA, 1092 bp, Artificial Sequence
  chemically treated genomic DNA (Homo sapiens)
aagtttatttttataagtatatattgagtttaatataaataaaaataaatatatagtgtaatttaaaatatattttgtataggttttgttgttttttgaaatgggtaatgaagggagtagagtaagaaaataaggaaaatatattttttgtaggtttataaatatttttaaagggtatttttatatttaatatattttttttagtggtattattgttttaagttgggtttttagttgggaataaaggtgttttgggtttgaaaggtgtgaggtgtttagaagtagttaagaatatgttttgttgttgttttttaagttagaattttgttaattttatgttttggaaatgttttagggttttttatttttgtggtttttgttttagtgttggtattgtttatgttggtgattaggttgtttagtaatatggtagggttgtttgggtaatgtggtttattttggtttgtttttgattataggggaaggttaaggggatttattttatttttttttttttttgtttttttttgagttggatgtagagtagtagtagtaggagaaggaagggaaagtttttggtgggtaggtattgtagttgttgttttgtttgtttatggtgtgaaggagtgttttgggtttttattgtggtagggtagtgttttttttatgtgtggtagttgtgtgtgtttagtttttattgtgtattatgtttgtttggttagtttttgggagtttgttggttgggttttttgggatggtagtggttttgtgagggatttgggttgtggttgaggatgtagagtaggagattgatagagtatttggtttattgggagaagatttggaaaggtgtgggatgggggtaggaagtgggtgtggtgagggagttaggttttgggggtgtggtgtgtgtttttgtttggagtttgttttttttggattagtgttgaggagaggagtggttttttggttttgggattttaatttgaggttattttgttattgaatttaattattgggtagtttagtattttatttggggtttagtatagaaagatttgaatgtttttttggatgatgaaggggaagttt

SEQ ID NO: 262 - DNA, 5203 bp, Artificial Sequence
  chemically treated genomic DNA (Homo sapiens)
agggaatttaatgtttttttggggtagaagggggtagtgtgtgtgaggtggaaggatagttatttttgttgtataaatttttttgtgggttgtgttgtgtgtgtaggggttggatgttatttggtgttagagttgggtttgaggagtggggtttggttgggaatgagggttgttagtttgggtggtgttatttgttgttttattttttattttttttttttttgtgaggaattagaggtattgggttgtgtgggttgagaatttttaaattttttttggttgtatttggttgagttaatttgtagtttttgttagtttttttgttttttgggtagtggttttttttgttagttaggtttggaagttattttttgtgagattgggttaggaagtgatgaaaagtgttgaattgtttttaaattgaaaatatttttttttttttttttggagatagtgttgataaatatatgggattttggtttttgatttttggttgttgtttttgtttttttgttgttaataaaatttgtattgagttttttagtgttttgattaataggtagattaatttttattggggttgggaatagtttgttttaattaatgttattttaaaagtttgttaggatgtgtttagttttggttttttggatgtttgagtgagttagttatgatatttgttttttttttttttttagttttaaattttttagtaaagtttttagtttttgtttgtttgtttttaggtttataatgggataaattgtaggattgggttgttggtttttagaataggtagtggtttagagaggggatatttagggagaagggattgaggtggttttgatttgtttgttttttttttgaagttgaatttttgttttttgggggtagaggttatagggaaaagagagatggggggattgttatagggtgatgaaatggaaagtaaatttttttaggaattttatttgtaaaaattggagagtgttgttgattttagttgttttatatgttaggagttttaaatttaatttttatttggataatagtatggagggattgggaggtaaagttttgggagtttgatttgttgggttgttaggaatttttttgttgggagattttattggataatgttattttaaaggtattttgggggtgggtagggagaagatagagagagaaagagagagagagagagagagagagagagagagagagagataggttggttttttagagtgaatggaagaggattgaggattgaatttagggagtttttagtattggttatttggtaggaggtgaggaagggtgagggtattgtggtttttttttaagttgagtagtggttatagtttgaaggtgttatggggtggttttgggatttttttggtttttttaggttttgggtttggtgaggttgttgggttagtgggaattggtaggttgttggagaaaggagagggataaaggtttggaagtgggggaggtattagggattgggtggttgggatgggagtttttgtttttagggtttattggatttgtttgttagttttgtggataagggattttatttttttagggtttgtaaaaagagagatgtttggggtattataaagtgatgtaggtgtttgttaagattttttttttttaaaaaatgttagtttttattttttttagtgtgttggtgttgtgtttttgtttgattggggaaagagagagtttggaggtgttagaattgttagaattttggatgggaggtttttggttttgaagttgggagttggaggtatttttttttagaagtgggtatttttttgtttttttgaaggtttgatggggtgggtataggggaatgttagggattggtgtgggtgagatgtttgttttattttatgttgatgtattaatattggttagaagttttgggtaggttttggtgagttatggttttttagtgggattttttttatgtagatagttttgttattgggtgggatgattttggtggtttttgtgggaatgtatttgttggtttgagaggttttttttttggttatagggggtggagggtaggggggaataggggtttgtggggaggtggggaaaggagatagaatttaaagtgtaatttttgttgtttttttgtgttttggagggtagtaagtgggttttgggtgtgttggtagttgtaattaaaatggtgatttgtgagttgttttggttttgtatatatttttggtaattgtgtttgtattttagttttggtttttatatttttaggttgttttgtttttagagttggtatttggtagagggagtgaggttttttatgaggtagaatagtatttttattttttttgagattagtttagagagaatgaggaaattttatttttatttttttttttttaaattttgaaaatttggttttattttggggttgaatttttttttttaaatattgatatatgggaagtagttaagttttttttgttttttgtttgtgtggaggagtttttaggagttttttttggagtttttttttttatttaatgatgttagtggtatttattttttgttttttgttttttttgattttttgttaaaatttttttttgtagtgagatgggggttggaggggtgggagaaggagttgatttaaagagttagtgttttggggggaaatagtaataagattatggttgtttttttttgaggtaaagtttaagaaggtgttaatttatttggttgttaattgagaggttgtaaaaatgatatttgtttttagtttggatagaattattttttttttttttgtttttttgtaagttttttgtttatgtatagtggatttgagttttgagtttaagtttttttaatgtttgtttggaaagtaaaaggagagagaaagagaaagttgatttttgttggtttgggatttagggttgtggttttatttgttggtattttttgaaagttgtgtttttgtgaaatgaaattttgtttaggaggttgtggatttggatatttggtgttattttttttatttttgatttaggtttttttttggtgttgtgagtttttggggaagggttagagttggtagttttttttagtttggggaggggagagggttatgtgattttatttttggttagggttggggaggtttttgttttttgggagttttgtttgggttttttggttgtagggttgttgggttttaggtaggaatgagagggtgaggtttatatgtggtttggtggtttagggtggtttgtagtgtttttattgttttggttgttaggggttgtggtgatgtggttagttagtagtgagtttaggttgtgtagattttattgatgagttttgatttttagtattttttttaagttaagaagagtttagtgtattttttggttgttttattttagtttttttgttttagttttttagttttatttttttttgttttgttttggggtgtgtatagtagtttaggtttttttttttttttttggttttgtggtttgaagttgttgagagagtttgggatagtgtaggattaggtagttgtttgtttttttgttattttaattgtaggttttgaggggtgtttttggagtgtattgaggtgtgttttaattgtgtggtatttaataaatggatttttggtgtgtggttagaagagaaaagttatttatttatttttttttttggttttttggtaatagttgaaggggagttgtttttgtggattgagtagatttaggagagggagttgtggtgtggagatatatgtattatatatagatgattggtggtatatatgatatatgttgatatattgatattgttagtgggatatatatatatatatatatatatatatatatatatatagagagagagagagaattttttttagtattggttatttgtttttttatttaggtttttattttttttttttttttattttttttggttttttttttttttgggtgttgtgaaaagtagttgtatttagttaataaatggtatgtgggagaagttggtgagtgtttggtgaggattttttagggttttttataagaattttttgtatataaagtaagtggtgtgtttatttgggtttttttagttagagttgtgtttttgttttgttgtgtattgtggtttttgaaaggagaaaggagagaagaaagggtggggagagtggggtggaggatttggataggttttggaggtttgggttggggaggtttttggttttgtttagtttttggtttggtaatttttttttggtttaggttttgttgtggtttttgtagttggaatggagttgttaggatttagtgatgtttttgttttttttttttttttttaaggggttaggtgggttggggtgtggttgttgttgtgttttgtgttttggggttttggttgggatggggtgggggtgggtgggggtggggtggtaggttatgttgttttggagttggtaagaaaggatagtatagaaatttgtattttttgaggattgggagttttgagtttagtttagggggagtgggggtgtgatttttaatttagaaatttttatttgattgtttaagtttgtggtagtagggtgggttgtgttgaattttggtgtgtgtggagtggggagatgtaggtgagtgttagagtttgggtttgggggttttgtgttggggagaggagttgggatttattggtggagttgaaaataagtgtatttatatttaaataaatggattaattgtattaggtggggagagggagtatttaattggttggtgtgaggttttggtgttgttttgtataaagtaatattttgtgtgagagtgagtggtgtatttgtatgttgtggagtgattagtgggtttgaaaagggaattgtggtttggttttattttttgttttggtttaggtgtaggaggaagtgttttgttggaggatgatgatagaggttaggttttgttaatgggttagtgaggagtggtggaggtgaggttgggtgttggtatatatatattaatatatttgagttattattaattagtataggtgtgttggttgtagttattttttttatttatattttttattttttattttttagttgttgatagtttattttattgttaatttttgttttttttttagg

SEQ ID NO: 263 - DNA, 5203 bp, Artificial Sequence
  chemically treated genomic DNA (Homo sapiens)
tttgggaaggagatagagattgataataaaatgggttgttagtggttggagagtgagagataaagagtgtgggtgagggaagtggttgtagttagtatatttatgttgattggtgatggtttaagtgtgttaatgtgtgtgtgttggtgtttggttttgtttttattgttttttattggtttattagtgaagtttgatttttgttattattttttagtaaaatatttttttttgtgtttgaattagagtgggaaatgaggttgagttatggttttttttttaaatttattaattattttgtaatatgtaaatgtattgtttgtttttatataaaatattgttttatgtaaagtagtgttggggttttgtgttagttgattggatgttttttttttttgtttggtgtaattggtttgtttgtttgaatatgaatatatttgtttttggttttgttggtgggttttggtttttttttttggtgtagggtttttgagtttgggttttggtgtttgtttgtatttttttgttttgtgtatgttgagatttggtgtggtttgttttgttgttgtgaatttgagtggttaagtgaaggtttttgggttgggggttgtgtttttattttttttaagttggatttgggatttttagtttttggagggtgtaagtttttgtgttgtttttttttgttaattttaggatagtgtggtttgttgttttgtttttgtttgtttttattttattttagttggggttttaagatatagagtatagtggtggttgtattttagtttatttggttttttggaagaagaggaaaggggtgggagtgttattgggttttggtagttttattttagttgtggaggttgtggtgaagtttaggttgagaggaggttgttgggttgagaattaaatgaggttagaggtttttttagtttaagtttttagggtttgtttaaattttttattttgttttttttgttttttttttttttttttttttttttggaagttgtggtgtgtagtggagtagaggtatagttttggttggagaggtttgagtaaatatgttatttattttgtgtatagagggtttttgtgaaaagttttgaagagtttttattaaatatttattaattttttttatgtgttatttgttgattaagtgtggttgttttttgtagtgtttgagaggaggggaagttaggggagataagaggggagggggagtggaagtttgggtgggggggtggatgattaatgttgggagggattttttttttttttttgtgtgtgtgtgtgtgtgtgtgtgtgtgtgtgtgtgtgttttattggtgatgttggtatgttagtgtgtgttgtgtgtgttattggttatttgtgtgtggtgtgtgtgtttttgtattatgatttttttttttgggtttgtttagtttatggaggtagtttttttttagttgttgttagaaaattggggaggaaagtaagtaaatggttttttttttttgattatatattagaagtttatttgttgaatgttgtatgattaggatatattttagtatattttaaaggtgttttttggagtttgtagttaaggtgataggagagtgagtggttgtttggttttgtgttgttttgagtttttttggtggttttgggttatggagttgggaaggagaaggaaggtttgggttgttgtatatattttaggatagggtgagggggaatagggttgaagagttgaggtagggaggttgaaatgaagtagttgaagggtatgttagattttttttgatttagggaaagtgttgaaagttagagtttattaataaaatttgtgtgatttgaatttgttgttgattggttgtgttgttgtagtttttggtagttgggatagtgaggatgttgtaagttgttttgggttgttgggttatatgtgggttttatttttttgtttttgtttgggatttagtagttttgtgattaaggagtttgggtagggtttttgggaagtaaaggtttttttggttttagttagaggtggggttgtataatttttttttttttttgggttggggagggttgttggttttaatttttttttgggagtttgtagtgttgggaggaaatttgggttagaggtgaaggaggtggtgttgggtgtttaggtttgtggttttttgggtgaggttttattttgtaggagtgtgatttttggaggatgttggtaagtggggttgtggttttgagttttagattagtgaaagttggttttttttttttttttttttttattttttaagtgagtattaaagaagtttggatttaagatttaagtttgttgtgtatgagtgagggatttgtgggggggtgggggggggggaagtgattttgtttgaattggaggtgagtattatttttataattttttaattagtgattgagtggattagtatttttttaagttttgttttggaaagaagtagttgtaattttgttgttatttttttttagggtattggttttttgaattagtttttttttttatttttttaatttttattttgttgtggagaaaagttttaataaaaaattagaaaaggtaaggagtgaggagtgaatgttattgatgttattgggtggggaagggggttttgggaaagatttttggaaatttttttgtataaataaaaaataaaaaggatttggttgttttttatgtgttaatatttggggaggggagtttaattttagaatgaggttgagtttttaaagtttaaggagagaggggtgagagtgagatttttttgttttttttggattggttttaaggaaggtgggggtgttgttttattttgtggggagttttattttttttgttaagtattggttttgggggtgaagtggtttaggggtgtgggggttgagattgaggtgtgggtgtggttgttagaggtgtgtataaaattgagataatttgtaggttgttattttaattgtggttattaatatgtttgaggtttatttgttgttttttaagatgtgggggggtggtggggattgtgttttaggttttgttttttttttttgtttttttataggtttttgtttttttttattttttgttttttgtggttagagggaggattttttaggttggtgggtgtgtttttgtgggggttgttggggttgttttatttggtagtggggttgtttgtgtggagggagttttgttgggggattgtggtttgttagagtttgtttagagtttttagttagtattgatgtgttaatatgaggtgaggtaagtattttatttgtattgatttttggtatttttttgtgtttattttattaggtttttggggaggtaaagaagtgtttatttttggggggaagtgtttttagtttttagttttagaattaagagttttttatttggagttttgatagttttgatatttttaaattttttttttttttggttaagtagaggtgtagtgttggtgtgttggaaagggtgaagattggtattttttggagaaggaaagttttggtagatatttgtgttattttgtagtgttttaaatgtttttttttttgtagattttgggaaggtgggattttttgtttgtggagttggtaaatgggtttagtgagttttaaaggtaaaggtttttattttggttgtttagtttttggtgttttttttatttttaggtttttgttttttttttttttttagtaatttgttggtttttgttaatttggtagttttgttgagtttagagtttagaaaagttaagaagattttagagttgttttgtggtatttttaggttgtggttattgtttggtttggggggaagttgtggtgtttttgtttttttttgttttttgttaaatggttagtgttaggggttttttgggtttagtttttagtttttttttgtttgttttgggaggttagtttgtttttttttttttttttttttttttttttttttttttttttttttttttgttttttttttgtttatttttaaaatatttttaaaataatattgtttagtggagttttttagtaaagggatttttagtagtttagtgggttagatttttaaggttttgttttttagtttttttatgttgttgtttagataggagttaggtttaaaatttttgatatgtaggataattgaaattagtggtattttttgatttttgtaaatagggtttttagaaaagtttgttttttattttattattttgtgatgatttttttattttttttttttttgtaatttttgtttttaagaggtaagagtttagttttaaaggaaaagtaagtaagttaaggttattttagttttttttttttggatattttttttttaaattgttgtttattttaaaggttaatgatttggttttgtgatttgttttgttgtagatttgggaataggtaggtgggaattgggggttttattgggggatttgaggttggggagggggagggagtaaatgttatggttggtttgtttaagtatttagggaattgaagttaagtgtattttgatgggtttttaaaatgatattgattaggataagttgtttttaattttagtaagagttaatttgtttgttaattaaggtattaaggggtttaatgtgagttttattagtgataggagaatagaggtggtagttagggattaaaagttgggattttatatatttgttagtgttatttttaaaaaaaaaaaaaaaagtatttttaatttgaaaataatttggtgttttttgttattttttaatttagttttatagagggtgatttttaaatttggttagtggggaaaattgttgtttgggggatagaggggttgataggaattgtgggttggtttagttgaatgtggttggggagaatttaagaatttttagtttgtgtggtttgatgtttttgattttttatgagaggaaagggaatgaaaaatgaagtaataaatgatattatttaggttggtagtttttgtttttggttagattttgttttttaggtttggttttggtgttgggtggtgtttagtttttgtatgtgtggtgtggtttgtgggaaagtttgtgtagtgagagtgattgtttttttgttttgtgtgtgttgtttttttttgttttggaggggtgttgggtttttt

SEQ ID NO: 264 - DNA, 8085 bp, Artificial Sequence
  chemically treated genomic DNA (Homo sapiens)
  unsure (2545): unknown base
gttttatgatttaattattttttaatatttttttttattaagattattatattggtgattgggttttgatatatagatttggggagaatataaatatttatattatagtatttattaatttatttagttattttattgttaggtatttatttagaaaaaatgaaaatatatgtttatataaagatttgtataatatttttatagtagttttatttataatattaaaaaaattggaaataatttagatatttatttatagttaaatggataaataaattatagtatataaataaaaagaataaaaagaattaattattgatatatattataatttagttgaattttaaaataattatgttgagtgagagaaattaaatgaaaaaaagatatattatattatatataattttaagaaataaaatttaatttatttggtatttagatttttatttttatattagttttaaataaaaagttttaaatttttttggataaatggttgattttatgattggggtaggaaatatataagatgagtttgatgagtttgtagtattttgtaatattagaaagtaggaaagtttatatatatatatatatatatataatatagagagtgggttaaggagtataagagttaattgaaaaagtttttagtgttaaaaattggaaaaatttgagtaataaagtatttatgaatttatataaagaaaagattgaataaagaagtaaatgggggagaagaagtaaattttttttatagaattttaaataaattatgtagatattttattttaaaggagggttagtataattttttatttttttatatttttttaagtgatttataatgatttttttttaaagagtatagagtatgtaaagagggaaaaaagagtaattatgtaatggagaaatttgataaatattattttagttaggtgatggagaataatattaatagttataagttatgttgataatatgtattttttatatgatgtaataaatatagtatattatttttttgatttttattttgttaaaatttaaaattttagtttatttatgaggatatattaaattttaatagaagggtattttgtaatatattttattagtatttttaaggattgttaaggttattaaatataaggaaaatttgagaaatttttatagttaagaggagtataagatattataataattaaatgtggtgttttggatggaattttggaaaggaaaaaggatattaagtgaaaatgaagaaaatttaaataaattatgaatattagttaataataatttattagtattagtttattaattgtaataaatgtattttattaatttaaaatgttaatagagaaaattgtataaatgatatatgagtattttttatattatttgtttaatttttttgtaaatttaaaattgttttttaaaagtaaaatttattaataaaatatttaaagtaaatagatttaaaaggtatatgtaaatgtataatttaatgtttaataaattagatataaatatttttaaaaatttaatatttggtgatagaaagtagattagtggtttgttagaaagtggtgattagtattaggggaaggggatgggatagaatagtatgaagggatttaaaaaatggtatgaggaaatttttggaggtaaagggtatgtttattattttagttttataggtttaataataaattatataatttaaatatatgtagtttattatatgataattatattttgataaagtggtttttttttttaaattatagaaaaaatatttttatatttaaatttttttttttaaaaatagtttttaggaatatttgaagttagttttattatatttgaatttaattagtgaattttgtttatttaaagatttatatatttgggaagtttttgtgttaaaaatgttaattatttagtattaaaatttatggaataatggtgatttaggatatgttggatatttttattgttgtttttttattttaagatttttaattttttggaaataatttttttagatattttgataagggaattattataattaattaaaattaagttaaatatagtttgttagatttaaaatgaggttaagtgttaattttatagtagtgattggaaaattaaattatatggtatttgatatttaaaattatatttttaagaaggttgttatttgatgttttgggtttgggttatagtatttaattttataatattgggtaattttgtgttttagtttttttaattatgaaattgggataatagtatttattttgtgagattgttgaaggattatagttaatataggtaaaaggtttataagattatttggtaatgttgttttgattttataaattttatatattgtgtggtattagttattaggaaaatataaataaattagtgagatattattttatatatttggggggttataataaaaaagatagataaaaaatgttgttaaagatgtgaagaaattaggatttttatttattgttggtgnaaatgtaagaagtataattatttgaattatagtttggtagttattttaaagattatatttagagttgttatatgaattagtaattttatttttatgtatatatttaggagaaaggaaaatatatgttgtataaaaatttgtatatgaatgtttattagtaggattttttatggtagttaaaaggtgtaaataatttaaatgtttaataattgatagagatggataaataaaatgtggtttatttatataatgaaatattatttgttaataaaaaggagtgaaggagtgaagtattgatttatgtggaatatggatgaattttgatttaaaatagttaaattataggtataaaaagtatattagtggttgttgggagatttaggtggaaatgtggaataattgttagtgggtattgagattttagagttatatttatgttataaaattaatagtgttgatggttgtataattttgagtatatgaaaaattaatgaattgatattttgagtgagttgtatgatattggaattatattttaataaagtatggtaattgttttaagataggttggaaagagaaagtttgaaaataataataatgatattaataaattagtttatttttttagttttatatatttttgtgtttatatttgtttttgttttatttataatggtttttttgtagttgttatattatattttgttatttgatgtttggtgaatattttatatttgttttttagaattttttttattttttttttatttgtttaatttttatatatttaaaattaattagagtaaattatttattagaataattaattttaaattttagtaatttaatatgataaaggtttgttttttatttatatagtttttttttagatgattgaggggtttaggttttttatttttagtggtttttttattttttggagttttttgtattttttatatatggttgagataaattatgagttattagtatagttagattttgaggttttataagaaaatttgtaaattatttattttgttttgaataaggtatatttaagatgatgttaaaatatttaatggttttgggttaaatatagtttatgattgtgtatttaaaatatatattgtaatatttttttttttttttattgattttatgaatttagtggggatttattttataagtttaaagataattattttttagattaagaatatttagggtaaaaagtattgtttaatatttttattgaggatgttatgatgtagtatattgtataagttggagttaaaggaaattttttttaaagtgttatttattaaaaattggaatatattttttaagataaattgaagtgtggtatataatatttaaatttttattatagatatagaggtgttattattttttatttttaaatttttttgttatgttgaggatatttaagaggagtaggatatgttggttgtagtaggagaaatttgaaagtatttatttttatggaatttataagggagagaattttttattttagtattgtttttgatatatttattattttaaaagataatgtagttaaatgtttttttttgtgttaaatttttataaaattgaaattttaaaatggtgataaaaattttatttttgatagaatttatttatttttttaattagatagggtataatttttaatttgtaaaataaaatgtaatatgtttatgaggttttattttaaagaatttgttattgagagtagtatttagaataatgggtggaaatgttaattttagagttttagattttattggtaattggggtagggaggggttttgggtggggtttttttagaggaggaggtgttgttagaaagttgtttggttagtttatagttgttattaattggggtaagttttgttgtatttgtgtgtgtgggtggtatttttaatgagaattagttttatttgttatttgagtgaaatttataatttgaggtggttagtgtttttgtattattgggatttgagatttttggagatgattgttgtttgtagtatggagttagtagaagtttgattttttttgggaatgggttgtattgagaggtttgattagttttagggttttagtgagggggtagtggaatttagtgagggattgagagttttatagtatgtatgagtttgatgttagagaaaaagttgggagataaaggagttgtgtgttattaaattgttgttgtagttgtagttatttaagtgttggatttgtgagtattttgtgtttttagtttttggatagaagttggagaatttttttggagaattttttgagttaggagatgagattttttaataattattatttttttttgtgttttttatttgttgtttgttgggataaatgatagttatagtttttttgatgataggatggaggttaagggtaggagttgattagtgttgtttttttttgtttttgatttaggaggtggagatttttttggtttagttatatttaatatttatttttttttttttttgtttttatatttttgaaatttttttttttttttttttttttttttttttggagatgggggaggagaaaaggggagtttagttgttatgattgagttgaaggtaaagggtttttgggttttttatgtggtgggtggtttgtttttttttgaggttggatttttattgttgtgttgtttagttgtaggtttgtttttggggagttagattttggatattttgtttgaagttttggttatatttatttttttggatgggttattttttttttggttttgttagggataggatttttttgatgaaaagatgtaggattagtagttgttgttggatgtggagggtgtatattttagagttgaagttataaggggtgttggaggtagtagttttagttttttagaaaaggatagtggattgttggatagtgttttggatattttgttggtgtttttaggttttgggtagagttaatttagtttttttgtttgtgaggttattagtttttggtgtttgtttggttttgaattttttgaagatttattggttgtttttgttatttagtgggtgttgtttttgtttatgagttggtttgggtgtaaggttggagatagttttgggatggtagttgtttataaagtgttgttttggggtttgttattagtttggtagttgttgtttttggtttttgagagtttttattggtttggggttttagtgaagttgtttttgtaggttgttgtggtggaggttgaggaggaggatggttttgagtttgaggagtttgtgggtttgtttttgaagggtaaattttgggttttgggtggtgtggtggttggaggaggagttgtggttgttttgttggggtggtagtaggaggtgttgttttggtttttaaggaagatttttgttttttagtgtttagggttgttttggtggagtaggatgtgttgattgtttgggatgtttttgttggttattatggtgatggattttatttatgtgtttattttgttttttaattatgttttattggtagtttgtatttggtagttgttggaagatgaaagttatgatggtggggttggggttgttagtgtttttgttttgttgtggagtttattttgtgttttgtttattttggttgttgtaggtgatttttttgattgtgtgtatttgtttgatgttgagtttaaggatgatgtgtattttttttatagtgatttttagttgtttgttttaaagataaaggaggaggaggaaggtgtggaggtttttgtgtgttttttgtgtttttattttgtggttggtgttaattttgtagtttttttggattttttgttggggttattgtttttgttgttgttgtgagtgattttatttagatttggggaagtggtggtgatggttgtatttgttagtgttttagttttgtttgtgttttttttggggttgattttggagtgtattttgtataaagtggagggtgtgttgttttagtagggtttgtttgtgttgttgttttgtaaggtgttgggtgtgagtggttgtttgtttttgtgggatggtttgttttttatttttgtttttgttgttgttgttggggtggtttttgtgttttattttgtatttggttttaatgggtttttgtagtttggttattaggttgttgtgtttaaggagggtttgttgtaggtttatttgttttattttaattatttgaggtgagggtttgggatggggtatgtttagtgtgtttgggagtagtggttttgttggtggtggtggttgttaatttttagttttagttttagtgtattgttgtgttttttggggtggttggagagggtgggtagtgggatatagtataggggtagttgtttttttttttttttttttttttttttatttttggggatatgaaggtgggtgtagaatatattatttttggggtgtgtttttttgaaagttgtttttttgtttgttttttaattttttgaattttttagattttgaagtagaattaattttgatttaaaatgtgtagtgttatattaggtttgttgtagtttagtggggtagaaagtgtgtggtgagttgggggttttatgaaatgttttttttttagaagaaggatgtttattaggagtgtttgttttggagaggagttaaggtattgtttttttgggaggggtgggatttgagaggtggttggttagaattgaaagtagtattattttagggatttgaatattttagtggtttagtttttttaagaattttaagattaaaattaagtttatgtgggaaatgtttaaattgtggatttaaatgtttgttattgtattgtattgtttttttattattgtttgttatttattataattttttttatatataggtttaaaaaatattattttgtatattgaagtaatggaatgtaaaaaaagaatgttttgtttggaattttatgttgtgaataggtaaaatagtgttagtgtattggataatattttaaaatgataaatatatatttgtttaagtaagtaatgattatagggttgtgttttaaaaatttaaaattaaaatattgtaaagtattattgaatttttaaagttaaattatatttgttttgatttagtatatagataggaaggatataatattttatttgttaaagattaaattgtttttatataaagagttttgtagaaagatttttttttaattgattttaattttttaggatataatattatatattaattattgtttttttatattggtgttattgatgaatggttaattatttgtaagtatggtgaatttagttatggatagtttattattaagtttagtttgtatgttttttaagtgtatatatatagttttgtttttaaaatttttttttattttgttaatattggtttaagaaatttttagtattagatagtggtgtatttaaaaataaatggagtattttgttttgtattttaagg

SEQ ID NO: 265 - DNA, 8085 bp, Artificial Sequence
  chemically treated genomic DNA (Homo sapiens)
  unsure (5541): unknown base
ttttgaaatgtaaaataaagtattttatttatttttaagtgtattattatttaatattaaaggttttttaaattagtattaatagggtgaaaggagattttaaaaatagaattgtatatatatatttgaaagatatgtaaattaaatttggtaatagattatttgtaattggatttattatatttgtaaatgattagttatttattagtagtattaatataaaagaataataattagtgtataatattatgttttagaaagttaaagttggttaaaaggaaatttttttataaaattttttatatagaaataatttagtttttgataaatgaaatgttatgttttttttgtttgtatgttgggttaaaataaatatggtttggttttaaaagtttgatggtattttgtaatgttttggttttgagtttttaaaatataattttgtaattattgtttatttaagtaagtatatgtttgttattttaaagtattgtttaatatattgatattgttttgtttatttataatataagattttaaatagagtattttttttttatattttattattttagtatgtaaagtagtgttttttaaatttgtatataaaaaaaattgtagtgaatagtaagtaataataagaaaatggtgtaatgtagtgataggtgtttaaatttatagtttaaatattttttatgtgaatttaattttaattttgagatttttaagaaaattgagttattgaagtgtttaaatttttaagatggtgttgtttttggttttggttggttattttttaagttttattttttttgggggaatggtgttttaatttttttttaagataagtatttttggtaaatgttttttttttaagaaagaagtattttataaagtttttaatttgttgtgtattttttgttttattgggttatagtggatttagtgtgatgttgtatgttttaaattggggttggttttgttttggaatttggaagatttggaaagttaaaaaataaataaaaaaatagtttttagggaggtatgttttaaaaatagtatattttgtgtttatttttgtgtttttaagagtgaggagaggagggaagaagaagggaggtaattgtttttgtgttgtgttttgttgtttattttttttggttgttttggggagtgtagtggtgtgttggggttggggttgagggttggtggttgttgttgttaatggaattgttatttttggatgtgttgggtgtgttttgttttgggtttttattttaggtagttgagatagggtgggtagatttgtggtaggttttttttgagtatggtggtttggtagttgagttgtgggagtttgttgaggttgagtgtagggtagagtgtgggggttgttttggtggtggtggtagaggtggaggtggagggtaggttgttttgtgggagtaggtagttgtttgtgtttggtgttttgtagggtggtggtgtgaatgggttttgttggggtggtgtgttttttgttttgtataggatgtattttagggttgattttgaggaggatgtagatgagattgaggtattggtgggtgtggttgttattgttgtttttttgggtttggatggggttgtttgtggtggtagtgggggtggtggttttaatgggaaatttgggaaggttgtggggttggtattggttataaggtaggaatgtggggagtgtgtggaggtttttgtgttttttttttttttttttatttttagagtgggtggttggaagttgttatagagagggtatgtgttgtttttgggtttggtgttgggtgggtatgtgtagttggggaagttgtttatagtgattggggtggatgaggtatagggtgaattttgtggtggggtaaaggtgttggtagttttggttttgttgttgtaatttttgttttttagtagttgttgagtgtgggttgttaataaggtgtgattgagaggtaggataggtatgtggatgaaatttattattgtggtggttagtggggatgttttggatgattggtgtgttttgttttattagggtgattttgggtgttgagaagtgggaattttttttggggattagggtgatgttttttgttgttgttttggtgggatagttgtggttttttttttagttgttgtgttatttagagtttgaggtttgttttttagaagtggatttgtagattttttggatttagagttatttttttttttaatttttattgtagtggtttgtggagatggttttattggggttttggattagtgagggtttttagaggttgggagtagtagttgttgggttggtgataggttttggggtagtattttatgggtagttgttgttttggagttgtttttaattttgtatttggattggtttatgagtggggataatatttgttgggtggtgggggtagttggtggatttttgggaagtttggggttaaataggtattaagagttggtgattttgtaggtgggagggttgggttggttttgtttgggatttgagggtgttaatagagtgtttaagatattgtttagtagtttgttgtttttttttgggggattagaattgttgtttttagtattttttgtagttttagttttggaatatgtgttttttatgtttgatagtgattgttggttttgtgtttttttgttggaggggttttgtttttggtagggttgagggaagagtagtttgtttagggagataggtatggttgaaattttaggtaaggtgtttgaggtttggttttttgggaatggatttgtggttgggtgatatagtagtggggatttgattttgggggagggtgggttgtttgttatgtggggagtttggggattttttgtttttagtttagttatgatgattggattttttttttttttttttttgtttttagggaggagggaaaagggaaggaggagggggttttgggaatataggggtagagggaggagaaagtgggtgttgaatgtggttggattggagggatttttattttttgggttgggggtgggggagggtggtgttggttagtttttgtttttggtttttattttgttgttaggggaattgtggttgttgtttgttttagtgagtggtaagtggggagtgtaagaaaaagtagtaattgttaggagattttgttttttaatttggggagttttttaagagagttttttaatttttgtttgaggattggagatgtagagtatttataagtttggtatttgagtggttgtggttgtgatggtaatttagtgatatgtggtttttttattttttgattttttttttggtattaaatttgtgtatgttgtgaagtttttagttttttgttgagttttattgtttttttattaaaattttggggttagttggattttttggtatagtttatttttaggaagggttggatttttgttggttttgtattgtgggtgatagttatttttgaagattttagattttagtagtgtgggagtattagttgttttgggttgtagattttatttaaatgataagtgaagttagtttttattgagaatgttatttatatgtataaatataataaggtttattttgattagtgatagttgtggattggttagatagttttttaataatgtttttttttttagggaggttttgtttaaagtttttttttattttaattattggtaggatttgaaattttggagttggtatttttatttgttattttgaatgttatttttaatagtaggttttttgggatggaattttataagtatattatgttttgttttgtaaattaagaattatgttttatttaattggaaaaatgaatagattttattagaagtagaatttttgttattattttaagattttagttttgtaaagatttaatatagaggaagatatttggttatattattttttaaaataataaatgtattaaggatgatattaaaataagaaatttttttttttatgagttttataaaagtgaatgtttttaagttttttttgttgtgattaatatgttttgttttttttgagtatttttagtgtgataaagaaatttgggagtgggagatggtaatatttttgtatttatgatggaagtttggatgttgtgtgttatattttgatttgttttaaggaatgtgttttaatttttagtaaatagtattttaaggaaagttttttttagttttagtttatatagtgtgttatattataatatttttagtagagatgttgaatagtattttttattttaaatatttttagtttgaaaagtaattatttttgagtttataaaatggatttttgttaaatttatgaagttagtagaaaaagggaagaatattgtaatatatattttagatatatagttataaattgtatttgatttaagattattgggtattttaatattattttaaatatattttgtttaaaatagagtgaatgatttgtaaatttttttgtaggattttaaggtttagttgtgttaatgatttatagtttattttaattatgtataaagaatgtagaagattttagaaggtgggggagttattagaggtaaggagtttggattttttgattatttggggaggggttatatgagtgagaaataaatttttattatgttaggttattaggatttggagttggttgttttagtaaatagtttattttgattaattttagatatgtggaagttaggtagatagaggaaaggtaaagagaattttgggaagtaggtatagaatgtttattgggtattaaatggtaggatataatatggtaattgtaaggggattattatgaatagaataggagtaagtgtgggtatagaagtatatgagattagagaagtaaattaatttattaatattattattgttgtttttaggttttttttttttagtttattttaaaatagttattatgttttattgaggtgtaattttagtattatatagtttatttaaagtattagtttattgattttttatgtatttagagttgtgtaattattagtattattaattttgtaatatgagtatgattttaaaattttaatatttattagtagttattttatatttttgtttaaattttttagtagttattaatatgttttttgtatttgtgatttggttattttggattaaggtttatttatgttttatatgaattagtattttatttttttatttttttttattgataaataatattttattgtatggataaattatattttatttatttatttttattagttgttggatatttgggttgtttatattttttggttattatgaaaaattttgttaatgaatatttatgtataagtttttgtgtagtgtatattttttttttttttggatatatgtataggagtggaattgttggtttatatggtaattttaggtgtggtttttggagtaattgttagattatggtttaaatgattgtattttttatatttntattagtagtgaataagggttttagtttttttatatttttgataatattttttatttgttttttttgttatagttttttaagtgtgtgaagtggtattttattgatttatttatatttttttgatggttaatgttatatagtgtatagaatttgtaaaattaggatagtattgttaggtagttttgtaagttttttatttgtgttaattgtaattttttaatagttttataaaataggtattgttattttaattttatagttgggaaaattgaggtataaggttatttagtattataaagttaagtattgtaatttaaatttaagatattaaatgatagtttttttaggagtgtgattttaaatgttagatgttatataatttgattttttggttgttgttgtaaaattggtatttggttttattttaaatttgataaattatatttggtttgattttggttggttataataatttttttgttagaatgtttggggaggttgtttttaaaagattgaaaattttgaagtgggaaaataataataaagatgtttagtatgttttaaattattattattttataaattttgatgttgggtgattagtatttttggtataggaattttttaaatgtatgaatttttgaatgaataaaatttattgattaaatttaggtgtgatggggttaattttaaatatttttgaagattgtttttggagaagaggatttaaatgtggaagtattttttttatagtttggggaaaaaaattattttattaagatatagttgttatataataagttgtatatatttaaattgtataatttgttgttagatttgtgaaattaaaatgataaatatattttttgtttttaaaagtttttttatgttattttttaaatttttttatattgttttgttttattttttttttttagtattaattattattttttggtaagttattaatttgttttttgttattaaatattaggtttttaaaaatatttatatttgatttattaaatattaaattatatatttgtatatgttttttaggtttgtttgttttagatgttttattaatagattttatttttgggaaatgattttggatttatagaaaaattgagtagataatatagagaatgtttatatattatttgtataattttttttgttagtattttaaattaatagggtatatttgttataattaatgaattaatattgataaattgttattaattaatatttatagtttatttagattttttttatttttatttaatgtttttttttttttttaggattttatttaggatattatatttaattgttatgatgttttgtgttttttttggttgtgagagttttttagattttttttgtatttgatgattttgatagtttttaggagtattggtgaggtatattgtaagatgtttttttattgggatttgatgtatttttatgagtagattagggttttgggttttggtggggtggaaattaaagaggtaatgtattgtatttattatattatatgaagggtatatattgttaatatgatttatgattgttaatgttgttttttattatttggttgaagtagtgtttgttaggtttttttattgtatagttatttttttttttttttttgtatattttgtattttttggaaggaaattattatgagttatttaaggaagtgtgggggagtagggagttatgttagtttttttttggagtggagtatttatataatttatttggaattttgtgaggaagatttgtttttttttttttatttatttttttatttagttttttttttgtatggatttatgaatattttgttgtttaaatttttttagtttttggtattgggggtttttttagttgatttttgtgttttttgatttattttttgtattgtgtgtatgtgtgtgtatgtgtggatttttttattttttggtattataagatgttatagatttattagatttattttgtatattttttgttttagttgtagaattagttatttatttaaggaagtttgagattttttatttgaaattggtatagaaatgaagatttgggtgttaaataaattaggttttattttttagaattgtatataatatagtgtattttttttttatttggttttttttatttagtataattattttgagatttagttaaattatagtatgtattaatagttaattttttttattttttttatttatatattatagtttgtttatttatttaattgtggataaatatttgagttgtttttaatttttttggtattataaatagagttattatgaaaatgttgtataagtttttgtatgaatatgtgtttttattttttttgggtaaatatttagtagtgaaatggttggataaattagtaggtgttgtgatatgagtgtttgtgttttttttaaatttgtgtgttaaaatttaattattaatgtgatagttttagtaggaggaggtgttggggagtgattaggttatggagt

SEQ ID NO: 266 - DNA, 7110 bp, Artificial Sequence
  chemically treated genomic DNA (Homo sapiens)
tgttttttgtgatgttttagaggttagaaggatgttttgaaggggaaaattgtaggagttaggtagagtagggttttggtttttttttaatgtttttttatttagataaatttgggttattttgtagaggttgtagtgagttatgattatgttattgtattttagtttgaggaatagagggagattttgttttaaaaaaaaaaaaaaaaaaaaaaaaaaaaaaaaaaaaaattttggtttattttatgaagtatttggtaggtgttttaatattttttggtatatgggaattatttttttttattattggaaggtttaaaaagtaaataatgtgttttatatggttagagttagtattaaggggattaagtagaataattggtagttagtgttagtttggagattaatatagttaaagttgttttgttatgttatgttttttttatttgtattgttttatggtttaagataaaatttttgaatgttatttggatatagtgagtatttggtttgttttattgtttttaggagtaattaatttaatttttatttttttgagaatgatgattttatatagtatatttttttattaagatgtgaaagatgatattatggtatttgaaatagttttaggagagatttgggatatgggaagtttgtagataataatggaaaatttttttttagaatatagttatttgtatgatttatagtagtgttttttggagaatgttttaaaattatttttattgaaagaataataatgtttgttattaggataaatgaaataaggggaaaattttagatttttggaataatgggtttatatttaatttaatgattattatgtttttatattttgtattatttagaaaatagtagttaaatagatagaaatatagaagattgtttaaaaattaaagttattgagttagatttttttttgaaaggttagtgtatgggagatgagaaaggtattatagagattagagtgtttatataaaagatattttagtagatgatttataaagagtatattaagtatttatattatttatattaagttgttggttattttgtttattaaagaaaataagaaagaaatttttttttgatattattttggtgtagtaataatagagttttggaattagttgttagaagtgataattaaagttagtttattatgtttattaattaatttatatagttattttgaagttttatataattgtttttttgttataagtttttatttttttttatggtattttggttttgaatttagataggtaaagaattaagtatggttgggtgtggtggtttatgtttgtaattttagtattttgggaggttgtggtgggtagattatgaggttaggagattgagattattttgattaatatggtgaaattttgtttttattaaattataaaaaattagtttggtatgatggtgtgtgtttgtagttttagttatttgggaggttgaggtaggggaattgtttgaatttgggaggtagaggttgtagtgaattgagattatgttattgtattttagtttgtgagattttgttttaaaaaaaaaaaaaaaaaaagaaaaaaaaaaaaagaattgaagtgtttggagattagtgtattgtaatatttatatagttaagtaggtatttttaattgaattttaaaaaagtattatttttgaaattttttttagtttagatagggttagttatttgggtagaaaggaaaagaaaaataaaaaattggaaaaggatgtattagtattttttttagaaataatttaatattaggaatagaaggaggattttatttattaatttttaataattatttgatgttgttgttgggttggttaaatatttgttaatattgatgatttttttatttattattagagagaagtagagggatttgatgtttagagaagtagtaaaatttattttttattttttttttttagttggatggaagtatttggaggttggttttatattttagtattttagtgttggtgatgtagattatttttgttttagagtaattttgtgttatggaatttaagaggattttgttgtattaggataggaatgtatttttgttttatttgtttttatgaaagtagattttagagatttttagatgttatgagattaattgttatttagggtaggttttaggggagggatagagaagggtagtgttaataatagggattttggagataagattagtaatttaagaaataaatgtgagatattttatttttttttaatttattttttttttaaaagtttatttttattttttttttttttattatgtagtaattgataattaaatatagttttggtttttattatgtaatttagtagaatatttagatattaggaattttttatttttggttatttatataataatgaaatttgtagtttatgttaggttgtgtggatagtatttgtatttttggaaattaattggaggttttttttttatttttttttggttgttttttatttttttttttattgtggtttttgttttttttaagttgattagaattatgtataaaattagtttttaataaatattaatattgaagttttagtaggttgttaatttttgtatagttattttaaatgttgtatataagtgtaaagttttatggagttttagaggtttttaagaatattgtaaatattttaggtttaattagtagttttggagttaggtaatggtttgtggttttttgtgttaggttttttgaggtttttagtttttagaggttgtttgtaattatgatgtgtatatatatagtatttttttttaaatatagtataaattttttttagattttgttaggtatttataattattgaatatatatgtagattgatttttatttttttaaagtttgaaaaataatttagtgttttaatttaggttttgttagatattttttgatttaaattgttgtttgtagttttattttttaagggaaatgaaaaaataataaatttttagattggtgttgatgtttattttttttaagtgggttgattatttgttttgtagatttttgatgggtggggtgtggggtaggagtgtgatttaatttttagtatttttgaattagtttttttatggtgataggttagtttaattggggttgtaaatagatttgataggtttgttttgggttgatggttattgattaggtttttagattagataagttatttggttgagtttatagtaggtggggtgtgtttattagtttaggggtagtgattggatgtttgttgtaatattggagaatgtatgttttgggttgtagtaggagatatttttaagtatagaattaaaagggtttattttaagtggtagggtattagtgatggagaggtttgagagttttagtgtttagtttttttttttatgtttgggaaggtgtagaataggttgatgtagagtaaggagtgagttttaggttttagttttttggtttgtttttagggtagtaggtgaggagtggtattagtttggggattttttttttgtgttttgtaagaattggtggtagttagtaggtggggaggtgggggtatgtgtttggatgtgggtgtttgtgtaattagttttttaagtgttagttttgatagtgtttttttgggaggttggtttgagtttttgtttttgttgtggtgtaggaagggttggggttttgttgtttgtattaggtaagagtattttgagtaaaggaagaagatgatttgtttttggagttattattggggagtgggaatttggaaagttttttaattagggatatatgtgattttttttggaaagtagttttgattgtggtttgtgtatttttttatttttttttgaatttttttaggtttttttgttttgtttatttgttgggttgtagttttttattgttttgtattttttatttaatttggtaattttaaatgtgtatggtttggttggggtgtgtggagtttggttttgggtgatttattttgttgggtttttatggtggttaagggggggtggggttaggtggtttttgagaattgagtttgattttgatgttgtgaattgatttggagtttgaggggaaagatgtttgatttttttgggggtattggagtgggtgtaggagaggtttgtggggtgtgttttatttatagggatttttttttagtttatttagataggtgttttttgggtttttgaaatttaatggttatgtgtttatgtttagtatgtttggttgagagtttttatttttagggtaaatgagttgagttattggggaagtgagaggtggggtgttgtaagggagttggatgaggtgatatatgttggtgatataatagtaggttgttttttgtgttaagattgatattatgaggatatagatttgggggaagggggaatttttaggtaaaggttgttatagttaaatttttgtgaatgattgtgatttgatagtggtgtaaaaggaaagagtgaatgtagtttatgttgtggaaatttaggggtagaggtaaggggggagggtattttttttgtagggattgtttttgtatttttttttatattgagtagtgtggttatttggttttttttatttgtgtataggtaattttagatttgagttagtgatattgtttaatgtatttattttagtttttattattagttttttatttttgttttataatagtttattttgtttttggttgggtttttgggtagaggttgaggtttagtttgttatttttgttttgtgttgttgtaaaagttgtagtaagtgtagttgtaggttggtggttgggaattggtttgagtaagttttaggtagttatattgggtatgtttagtagagtttgtggtttggggattttgtgtttgtatttagagttattgttttgtttttttttattgttttttgttttgttttgttttttttttgtttggtgtggttttgtttgttttttgtttgttttttgtttttttttggttttttgaggtgtttgggtttttggtgtggtggtggagggggtgggtaggttggtgggtggtgatgtggtgggattttttatgtgttgtggtaggatatgtgtttggtgttgggatgtgattgtgtttagttttttttttttggaagttgtagttatgatggaagtttgagagttgagttgttgtgaggtgaggttgggtttaggtgagggagatgagagatggtggtggttgtggtttggagttttttttagtgtttgtgagtagttgtgggggtagtgtttttggggagttggttggtttgtggtggtggtagtggtggtgttttttgttttttttttgttttttttaattgtgtagttttttttttggttttttttgaaagggaaggtggaagttgtgggtttgggtgggagttggttgaggtgtggtggtggtggtggtattttttgtttttggagtgggggggagaagtggtggtggtggtggttgtggtggttgtagttttagggagggggtttgagttgtttgttattatttttagggttgggaatgttggagagttggtttttttttttttattgtttttaatatggtggtggtggtggtggtatatttagggatttgggttggttttaaattttttgtttgttgttgttgtattttttgtggtttgggttttggaggttgttggtggaggtagttgtttggaggattatttgttttttttttattttgttgttgttgttgttaggtttttggttgttgaggagaagtaggtttagttgttgtaattatttagtagttgttgtagtagttattatttggttgtggtttagagttaagtggtggtagagtgaggggtattagttattgttaagtttagagttatttttattttgtagaagaagttttgttattagtagtttttgttatttttttttttttttttttttagttataggtttttagatatgatagttattattaaagagattgttagtagaaataaaaggagatattaagaggatggatttgatttagatttgatttgtatttatttttgtggttgtttttttttatttttttgttatttttttagaatgtgggagtagatggatgtgaaaatgtttgtagtttgggtgattataatatttaattttggttaggttgttaggttatatattttgtgttttttttttgtgtatttaatttagggtgtgtttggttagatggaatttttgtttggttgtaagtgttaagttattgattgtttttttaggttatttatatggtttttttttgagggttattgtttgttaatatagaatatagtatattgttagtggattagtgagtttggtaatttggttttttaaatgaataaaaaagtagatgttttttgaggttgagtatattttgattaaattttggtttaggttttagattaagggtttagattagaataaaatgaaaattagtgttgtatgtatgtatattgtattagaattttgtagtgattgttttagttttttgagttgtattgatagatttttttaaaatatgattgatttgtataattttagaagtagaattatttttagtatatatggtgtatattgagggtaaaaagtagttttgttaatgtttaaatttaagttatttataattttgaattgtatgtagaagttttgtagtttgaagttaatagtgttataatatattttataaggtgtttttattagatttttgttatatttatttttttttttttttatggggtgatgtaggatagtgtttgaaatttgtattttagtagtatttaatgtttagtgtttttgttataaatatagaatggatattgagtagtttttgattttagatggtaatgtgtaggtttaagggtattgtgtgtagtaagtgaagattgtagaaataaaattttagtttatgtttgaaatttaagtattgttgtgatgttagaattgttgtttattgtttttaggttttaggttttttgatattttttggtattgttaattttattgatttg

SEQ ID NO: 267 - DNA, 7110 bp, Artificial Sequence
  chemically treated genomic DNA (Homo sapiens)
taaattagtaaaattaatgatattaaaaggtgttagaggatttgaaatttaaaaatggtgagtagtaattttggtattataataatatttaaattttaagtatgaattgaagttttatttttgtaatttttatttgttatatataatatttttgaatttatatattattatttgggattagaaattatttaatatttattttatgtttatgataagagtattgaatattaaatgttattgaagtgtaaattttaagtattattttatattattttatagggagagaaaaaggtaaatataataaagatttagtaagaatgttttataaggtatattatggtattattgattttaaattataaaatttttatatatagtttaaagttgtaggtaatttaagtttaaatattaataaaattattttttgtttttaatgtgtattatatatattgaaaatgattttgtttttaaagttatgtaaattagttatattttaaaagaatttattaatgtaatttaggaaattaaaataattattgtaagattttgatgtaatatgtgtatgtgtaatattaatttttattttattttgatttaaatttttgatttagggtttaagttaagatttaattgaaatatgtttaattttaaaaagtgtttatttttttgtttatttaggagattggattattgagtttgttaatttattaatagtgtattgtattttgtattaatggataatagtttttaggaagagattatatagatagtttaagaaagtaattggtggtttgatatttgtaattaggtaagagttttgtttagttaaatatattttaggttgaatatatagaaaggaaatataaaatatatgatttagtaatttgattagggttaaatgttatagttatttaaattatggatatttttgtatttgtttatttttatgttttaagagagtgatagaaaggtaaagaggagtagttgtagaaatggatataggttaagtttaagttgaatttatttttttgatatttttttttgtttttgttaatgatttttttgatgatggttgttatgtttgggagtttgtggttgaagaaaaaggaggagagagatggtagaagttgttggtggtggggttttttttgtaggatggaaatggttttggatttggtggtagttgatgttttttgttttgttgttgtttggttttggattgtagttgggtaatggttgttgtggtggttgttggatggttgtagtgattgggtttgtttttttttagtagttagaggtttggtagtggtggtagtggaatggggagaagatgaataattttttgaatggttgtttttgttggtggtttttggagtttgggttatggggggtgtggtggtggtggatgggaggtttaaaattggtttgggtttttggatgtgttgttgttgttgttgttgtgttggaggtagtagaaggggagagattaattttttggtgtttttagttttggaaatggtgataggtgatttagattttttttttggagttgtagttgttgtggttgttgttgttgttgttttttttttttgttttaggagtgggaggtgttgttgttgttgttgtgttttagttggtttttgtttgagtttatggtttttatttttttttttaggagaagttgaggaagaggttgtatggttagaaaagatgaagaggaggtgagaaatgttgttgttgttgttgttgtaggttggttggttttttgagggtgttgtttttgtggttgtttataggtgttgagaggggttttgggttgtggttgttgttgttttttattttttttgtttgagtttggttttgttttatagtggtttaatttttaaatttttattatggttgtagtttttgagaggagagaattgagtgtagttgtgttttagtgttgagtgtgtattttgttgtagtgtataaagagttttgttatattattgtttgttggtttgtttgttttttttgttgttgtgttgggagtttgggtgttttggaagattgaggggaggtgggaggtgagtgagaggtggatgggattgtgttgggtgaggggagggtagggtagggtagggggtggtaggagggggtagagtggtagttttgggtgtgagtgtagagtttttaagttgtaggttttattgagtatgtttagtgtagttgtttggggtttgtttgggttggtttttagttgttagtttgtagttgtatttgttgtggtttttgtagtaatgtgaggtgaggataatgagttaagttttggtttttgtttagaaatttagttggaggtagggtaggttgttgtggggtgggggtggaggattgatgatgaaagttgagatgggtgtgttgagtagtgttattgatttgagtttgaggttatttgtgtataggtgaaaaggattaggtgattatgttgtttagtgtagagggaaatgtagggatggtttttgtaaggggaatattttttttttttgtttttatttttagatttttgtggtgtggattgtatttgttttttttttttgtattgttgttggattataattgtttgtagagatttgattgtaatagtttttgtttagagattttttttttttttaaatttgtgtttttatggtgttagttttagtataaagagtaatttgttattgtgttgttagtgtgtattattttatttggtttttttgtagtgttttattttttgtttttttggtaatttggtttgtttgttttaaaaatgaaagtttttagttgagtgtgttgaatgtgaatatatagttgttgaattttaagggtttaaagggtatttatttaaatgaattgaaagaggatttttgtgagtgggatgtattttgtaggttttttttgtgtttgttttggtgtttttaagagagttgagtatttttttttttgggttttaggttggtttgtggtgttggagttaagtttggtttttagagattatttagttttgtttttttttggttgttgtgaaaatttggtaggatggattgtttggggttaggttttgtgtgttttggttggattgtgtatgtttggggttattgggttgagtggaaagtatggaatggtaggaagttgtagtttagtgagtgggtggggtgaggagatttaggagggtttaaaaggaggtggaaggatatatgggttatagttggaattattttttgaaggaggttatgtgtgtttttagttggggaattttttaaatttttattttttagtgatagttttggaggtaagttgttttttttttttgtttggggtgtttttgtttggtgtaggtagtggaattttaattttttttgtgttgtggtggaaataggggtttggattagttttttgaaggagtgttgttggggttggtgtttggggaattggttatataagtatttatatttaaatatgtgtttttgtttttttgtttgttggttgttgttgatttttatagaatgtggggagagagtttttaaattggtgttattttttgtttgttattttaagagtaagttaaaggattgagatttgagatttattttttgttttatattgatttattttgtgtttttttaaatgtgggaaaaggagttgggtgttagggtttttgggtttttttattgttgatgttttgttgtttagggtgaatttttttggttttgtgtttgagggtattttttgttgtagtttagagtgtgtattttttgatgttgtaataaatgtttagttattatttttgagttggtgagtgtgttttatttattgtggatttagttaagtgatttatttggtttgagaatttagttaatggttgttagtttagaataaatttgttaagtttgtttatagttttgattgggttgatttgttattgtgagagagttgatttggaaatgttgagagttggattgtatttttattttgtattttatttgttaaggatttataaagtaagtagttgatttgtttaaagagaatgagtattaatattagtttgggaatttattgtttttttattttttttaggaagtagaattatagatgataatttgagttaaaaaatatttaatgagatttaggttgaagtattgagttgttttttaaattttgagagaatgagaattaatttgtatgtgtgtttaataattgtaagtgtttagtaaagtttaaagagggtttatgttgtatttgagaaagagtattgtatatgtgtatattatagttgtaggtaatttttgaagattagaaattttaagagatttagtgtagaaagttataggttattatttaattttgggattattaattaaatttgggatatttatagtgtttttagagatttttgaggttttataaaattttgtatttatatatagtatttaagatagttgtgtaggagttaataatttgttgaagttttagtgttgatatttattgaagattggttttgtgtatagttttggttagtttgggaaaggtaaggattatagtggaaaaggaaatggaaagtaattggaaaagagtaagagaaaggtttttagttgatttttagagatgtagatattgtttatatagtttagtgtgaattatagattttattattgtataaataattaaagataaggagtttttgatgtttaggtgttttattagattgtatggtaaaaattagagttgtgtttaattattaattattgtgtggtagaaaaagggaaaatgaagatgaatttttaaaaggggagtagattagggaggggtaaaatgttttatatttgttttttagattgttgattttgtttttagagtttttgttattagtattgtttttttttgttttttttttggagtttattttaagtgataattagttttatagtatttgagaatttttgaaatttgtttttatggaagtaaatgaaataagggtgtatttttgttttggtgtgatagaatttttttggattttatggtatagagttattttggagtagagataatttgtattattagtattaaagtgttagaatatgagattagtttttaagtatttttatttggttgaagaaagaaaatgggaaatgggttttattgtttttttaaatattaggtttttttatttttttttagtggtgaatgaaaggattattaatgttggtagatatttggttagtttaatagtaatattaggtggttattaggagttggtgaataaaattttttttttgtttttagtgttaagttgtttttgaaagaaatattgatgtatttttttttaattttttgtttttttttttttttttatttaaatggttggttttatttaaattaaagaaagttttaaaaatagtatttttttaaagtttagttgaaaatatttgtttggttgtatagatattataatatattggtttttaagtattttagttttttttttttttttttttttttttttttttttttgagatggagttttataggttggagtgtagtggtatgattttggtttattgtaatttttgttttttaggtttaagtaatttttttgttttagttttttgagtagttgggattataggtgtatattattatgttgggttaattttttgtagtttagtaaagatagggttttattatgttggttaggatggttttgattttttgattttgtgatttgtttgttatggttttttaaagtgttgggattataggtgtgagttattgtgtttggttatatttagttttttatttgtttggatttagaattagaatattatagggagaagtagaagtttgtaataaagggataattatataaagttttagggtgattatgtagattgattagtaagtatggtaaattagttttaattattgtttttaatagttgattttaaaattttattgttattatattaaaataatgttgaaagaaaattttttttttattttttttgataagtgaaatgattagtaatttgatgtggatgatataaatatttgatgtgttttttgtaggttatttgttaagatgttttttgtgtaaatattttgatttttatagtgttttttttattttttatatgttgattttttaaaaagggatttaatttaatagttttaatttttaaataattttttgtatttttgtttgtttaattattgttttttaaataatatagaatataaaaatataataattattggattgaatgtaaatttattgttttaagggtttgaggttttttttttattttatttattttaataataaatattattgtttttttaataaagataattttaagatattttttaaaaggtgttattgtgggttatataagtaattatattttaaaagagaattttttattattgtttataagttttttatgttttaaattttttttgaagttattttagatgttatggtgttattttttatattttggtagagagatgtgttgtatgaaattattatttttagagaaataagggttgagttggttgtttttgagaataatagagtagattaggtatttattgtgtttaagtggtgtttagaaattttgttttggattgtggagtaatataaataaaaaagatataatatgataagatagttttgattatgttagtttttaggttaatattagttattaattattttatttggtttttttaatattaattttagttatatggagtatattgtttgttttttagattttttaataatagaaaaaggtaatttttatatattagaaaatattgggatatttattaggtgttttatagagtaggttgaaattttttttttttttttttttttttttttttttttttttgagatggagtttttttttgttttttaggttggagtgtagtgatgtgattatggtttattgtaatttttgtagaatagtttgaatttgtttaggtagagggatattgagaaggagttaaaattttgttttgtttaatttttataatttttttttttaaaatatttttttggtttttaaggtattataaaaaata

SEQ ID NO: 268 - DNA, 6478 bp, Artificial Sequence
  chemically treated genomic DNA (Homo sapiens)
tttattttgaagggatgtttaagaaatattgttaaatttaaaagtgttgtagagtaatatgtattataagattatattggtataatagtaataaatagtatttttttatataattttaaaaaaatatatagatttatgttaagtattagttaagatgtttggtatatggtaggtatttaatatttaatgaatatatgtagaggatttttattttttattttatattttttggataagattttgaatttttatgagtatgtattatttaaatttagatttatagggagtgatggaaaatgtgaaaataaaattttaaaaaggaaaagaaagagtaaagatttagatttaaaaaaggaaatgtaaataagatgaaatagttaaagataggtttttttaaaattaatgttgagataatgttattagtagtgatagttagttaagagatggtttgtagtttattgtttagtattgaggtatttagtaggggttgtatttaatttttaagttggaattaattgaaattgttgggtttgaagagttgtttttatgagttattgatggtagaaagtatagaagtattaaagaaaataatttagaaatgtggaaagagaaaagtatgtttttgttttgggagaataatatttgtgtgtaattaagtaggaagattttgtggaggaaagtttgaaaaagtagagagttgaagagaaaagagttaaatgaaggatatggtggttaatatttaaagtaaaaagatatttttgaagaagatgtgtttttagggtttttaagaagttgttatatttatgtttagagttattttgtaagtttatttggaaagtgtattggtgttttttggtataagatttatgaatattaatagttttgttatgtgagtaggtgtttatattgaagggttataagtaaagtttttatgtgttattattgttagaattttttttgtttttttttaatataaaagtagttttgtttgttagtatggaagttttgggaagagttttatatttgttttgtgttgttaatatttttgttttggtttttttgttggaatatataagttatttagtattagttatttatttttttggtagaattgtggtaagaggggattaatagggaaaaaaaattaaaaaataaataaaaagttaaaataatatgaaagagttgggtatgtttttaaaataattagtgtttattttttttagttttgtgtttgtgtttgtttgtattttgtatgtttgtttttgtggtggggggggatatgtttgtgtttttgaaaatttttttatttagatattataaggtattagtttaattttgaatatagttggttgtagtatggtgtatagatatgattgttttttttttagaaaattttttagtttaaatatgtttgtagagtatgatttatggtgtttttttttggattgtttagtgggtaattgttgtatgaaaattagagaaatagatgtagattttgaattttggttataaatttttgttttatgattatgggttttaaatgtgttgtgttatattgataaatatatagttattttgaaataaaatggattttatttttaaagttttgttttttgttttttattttttgtttgtttgttggttggaaatatatttattagattattgattaaatataaagaaaatagagatgatatatattagaatgttattttatgttataataagaagatatttgggaaagttttttttaattttgtggttaatgtttaaaatgggtgttagtagtttatattttattatggataaattggtttattttttattttttattttatttattaatttttatagtgtatggatttgtatttaaagaattatggtttatttatgtattttttttttattttatttaaaatgaagaatttggagatagaattaagtttttaagaagtgtaagtatttattgatgaagaaataattagtatgtggttaaattatgggtttgttttataaattaatatttggattaagtaatagttttaattattgttattagtataattaatttatgatgaggaatgattaattgattagtgaatattgttatattataagaaatttatattattttttttatggggatttaaatattgattatttattttaaggtttaagtttattttttagttgagaattttaaggtaattatatattttatatttttttgtataaagaaagaaaatattgagttgtttaatttttattatatatagagagagatatattaatgttgttatttttgtgtaatgatatagtatagaggtaagaaatttggaagtagtggttttgtttaatgaggttgattttatagtttaagaaatgagaatgaatagaattttgaggatatttatttttatttttatttttttgggattagtgtatttttattttttggagagatgttaagtaagaatgtgtagtagttttttttggataatagatttttgtatatatatatttgttagtgatgttatgttttttatttttaatttaagttttttttgttttatttttaatatagttgttttttttttttttgtttaataattttttatttatttttattgtttggtaaaaatgaatttagtttttaaggaattttaaggattttaaataagtatttggagttataagttttatggattaagtagaaattggtatataatgtagtgttttgtgtatttttataattattttaatgatagtgtgttaaatgttttgtaaatttttttgtgtttttttgtttaaaatgtgtgttttttttgtagttaaagggttttttataataagtttttgttataaaatgatggttatataaaagagagaagagaggtgtaaaaataataaatatagatttagtaaaaattttatttttttattgttttgaattttttaatagtaagaattgagtttgttgggttgaaaattgttttaatgtatttttataaaaggatttttgatttggtaagtgtgtgtgatgtatattttttatgttatattataagtgttatttagtaattttattagatagggtagtgttttagtatggggtggggtgttttttgataggtttttaaaaggtttggatgttaatgtatattttaatattatttataaaaaggagattggagtagtgtttttttttgtattgggtaaggagattttttttttttgtttaattatttgtttgttttgttttgtgggagaattataagtaaatgttatagaggtagtggagaaaaaagggtgttttaatttttttttagagttttttttatttgatgtatgttgtattttttaaataagttgtgtaaaatggttgtagggtagattggtttttttttttaaagttttttatttggttgggtttatttgtaaatattgtatttattttttttagtgttttaggattggttggaaagatttttttttttgtaggttgggttagtgtgagagatttaaaaaattatttttttttaaaattattgtattttaataaaaggattgggtaggggttggaatgagagaaaattggttttttaaaatgtaaaattgttatatttaaattagtttataaaatatgtgtttaattatgtggtgggatgtgtgtaggtgtatgatgagagaggtaattaatatggttatttggggtgtaaggatgtgggaataggtaagtaatttttatattggatttttattttagggagttgggttttagttatagttttgagttgtgtgattttgggtaggttttatttttttggggttttgttttattagttgaatagtatgaggatgagttatagttaatatttgttttatgatatttatttagtattatataagtgttatttttgtttttttagttaatattgatgtgggtagtattatatgtttattttatagatgaggaaattgaagtttgaagaagttaaatatttattttagaatatatagttggtaagtggtagatttggaattggaatttagtttagtttgattttttaatttatgtttttgattattatattgtttttttaagtttagatttgaaattttattttttgtgtggttgtgtgtttgggataggggtaattaatttttgattattttatatgttgtatagaatttggagaggattttttaaagtaaatgaattttgaaagttggattgtagagtaaatgagtgtagttaatttagttaggggtttgtaagagggagaaagagaaaaagattgtggaatggaaagttttttaatttaagttttttttaaggggtagttattttttgttttatagtttagggtttgtatgtgttttttttggagtggaaaaatatataagttataaggaatttaatagatagaaaggtgtatagaggaatttaaagtgtgggttggggggtgaggtggtgggtgggaggtgagtgggtgtaggtggaatattgttttttaagttaagttgttgtaaataaaaaggtgtaaagggagagaagttggtgtttaatgtgagttaggagtagtgttttggttttttttttgtttattttaaaagtattttttgtattgtttttaaggtgagaaataggaaagaaaatgttggtttgtgtgtttgttgtttgtttttttggttgtttgtttttgtagggttgttgggagtttttaagttttgtgagaattttgggagttggtgatgttagattagttgggttatttgaaggttagtagtttgggtagggtttattgaaagtttatttgtatatattaggtaatttaattttttattttgtgtgatagaagtagtaggaagtgagttgtttagaggtaggagggtttattttttgttaaaggggggattagaatttttttatgtgagttgtttgaggattgggatgttgagaatgtgagtgatttgagtagggtttgtttgggtattgttggggtaggatttggaatgtatttggaaggttttttgtaagtatttatttggaaggagaatttgggatttttttgggaattttttgttttggttggattggttgagtaagtttggaaaatggtaaatgattatttggattaattataggtttttagttggtttgtttgttataatttatgatttggggttgggaaaaagattaatagtttatgtgttaaaaaaggggtagagtttgatggagttgggtggatttttttatgttatttgtttttatatttagaggataagtatttttgtagatatttagtgtaagggagattatgtttgattgtatggatgttttgttagtgagttttgggtaaattttggatttttatattgtgagtttgtttttttgtatgttttaggagaaagtttttaaagtatgttttagtggattgatttaaattgaatggtagtattggtatattgtttaatgtaggtttatttttttttttttttttattaagaaaaaaaaaattgttttttttgtatgtaataaagatgttggaaataaattgtattggtagtaagataaaggatttaatgatttaatgttgaaggggtgtgatatgttggtatgtatattgattttttttgttgaaaattttttgttagatgttttttttttaaataattttttttgtttttatgtttttttttttattaattttatagttttttgaaaatagtttttaaaatatgtataaaaatgtggggggtggggagtagagggtgattataagattttaaaatattttttaagtagggtaatttgatatattttgtagtttttattaaaatgtatgtagagtggaatttaattttgttgttttttggattagttattagttgtataggtttttttattttttgtgtattttaatagtttaaagtaattaaaatatgatattttttttgaaaggaatttagtttaattaaggtggttgttgtttttgaagtttataaattattagtttaagttgttgtttttaatgttttttttgttaaggaaaggtaatattttttagtattgattttgttgttatttttttaagttattttgttggtttaagaagttgttgttttgttagaaaattattggtaatgaatattttttggattgagttatttattatttttatattttgtagtttagtttggaatgtggatattagttaaaggaaaggaaatataagtggggtagtttaatttaaaaaaaaaatattgattattttgttatttgatgttgatatagtgttgaggtatgtatttggttaatagtagtttggttgtaggtttgagaaatgattaggagttttagaaaattttatttttgggtggttgtagtgggagtttgtaggatgttttgttgttttgatagtgatttagataaatggtttagttatttattaaaatgtttttagtattttatttg

SEQ ID NO: 269 - DNA, 6478 bp, Artificial Sequence
  chemically treated genomic DNA (Homo sapiens)
taaataaagtattaaaaatattttgatagatagttgagttatttatttaaattattgttagggtggtgaagtattttgtaggtttttattatagttatttgaaggtgggattttttgggatttttgattattttttaagtttgtagttaggttattgttgattaggtgtgtattttggtattgtgttagtattagataataaaatagttaatattttttttttaaattgggttattttatttatatttttttttttttaattgatgtttatgttttgggttgaattgtaagatatggaaataatggatggtttagtttaaggggtgtttattgttagtagttttttagtaaaatagtaattttttagattaataaagtgatttggaaaggtggtagtagggttaatgttaagaaatattgtttttttttagtaaggaaaatattggaagtggtagtttgaattggtggtttatgaattttgggagtagtagttattttaattaaattaaattttttttaaggaaaatgttatattttaattattttggattgttggaatatataaggggtggggggatttatataattagtagttaatttaaagaatagtaaagttaaattttattttgtatatattttagtaaaaattgtaaaatgtgttaaattgttttatttgaagaatgttttaaagttttgtggttattttttattttttattttttatatttttatgtatattttaaaaattgtttttaagagattataaggttggtaaggagaggagtatgggggtgggaggggttatttgggaagaaaatatttaataggaaatttttagtaaagggaattaatatgtatgttagtatattatatttttttagtattaaattattaaattttttgttttgttattaatgtagtttatttttaatgtttttattgtatgtaagagagataatttttttttttttggtagaagaagggaaaaaaataaatttatattgagtagtgtgttgatgttgttatttggtttgggttaatttattgaagtatgttttgagagtttttttttggagtatgtaggaagatggatttgtagtgtagaaatttaggatttgtttaggatttattgatagaatatttatatagttaaatatgattttttttgtattgaatgtttgtaaaagtgtttattttttaggtgtggaggtaaatggtatagaaaagtttatttaattttattaaattttgttttttttttggtatgtaggttgttggttttttttttagttttgaattatgaattatgatagataagttagttaaaagtttgtaattgatttaaatgattatttattattttttaggtttgtttggttaatttagttggggtggggggtttttagaaagattttaagttttttttttaagtaaatgtttgtaaaaagttttttgaatgtgttttggattttattttgatggtgtttagataaattttgtttggattgtttgtgtttttggtattttagtttttaaatagtttgtatgggggaattttggttttttttttggtaaagaatagatttttttgtttttgaatagtttattttttattatttttgttatatagaatgaaagattgaattgtttaatatatgtgagtgaatttttggtgaattttatttgggttgttaatttttaaatgatttaattagtttgatattattaatttttaggatttttatagagtttaaaaatttttagtagttttgtaaaagtagatagttagagaggtaggtagtgagtgtataagttggtgtttttttttttattttttattttaaaaataatataagaagtgtttttaaaatgagtaggggaggagttgggatgttgtttttggtttatgttgagtattaatttttttttttttatgtttttttatttgtggtggtttagtttggaaaatggtgttttgtttgtgtttgtttgttttttgtttattgttttgttttttagtttatattttaaatttttttgtgtgtttttttgtttgttaaattttttataatttatgtatttttttattttagaaaaagtatatgtaagttttaaattgtagaatagagaatggttattttttgggaaaggtttgggttgggaaattttttattttatagttttttttttttttttttttttgtaagtttttggttgaattgattgtatttgtttgttttgtaatttagtttttgagatttatttattttgaaaaattttttttaggttttatgtagtatatagagtagttaggaattggttatttttgttttaaatatatagttatatagaaaatgagattttagatttggatttgaaaaaatagtatagtggttaagagtatgggttggggaattaaattgaattagattttaattttaggtttgttatttattagttgtgtgttttgggataagtatttaatttttttaggttttagtttttttatttgtaaaatgggtatataatattatttatgttagtgttaattgggaggatagaaataatatttgtatggtgttgggtaaatattatggaataaatgttagttgtgatttatttttatattgtttaattggtgaaataaaattttggggagatgagatttatttaaggttatatagtttagagttgtgattagaatttagttttttaggatgaaagtttaatgtgaaaattatttgtttgtttttatatttttgtattttaaatagttatgttggttgttttttttattatatatttatatatattttattatataattaaatgtatattttgtaaattggtttaagtatgatagttttatattttgaaggattagtttttttttattttagtttttgtttaatttttttattaaaatatagtaattttaagggaaaatgattttttagattttttatattgatttaatttataggaagaagagtttttttagttagttttaaaatattaagaaggatagatgtagtatttataaataaatttagttggatggagagttttaaaagggagagttaatttattttgtagttattttgtataatttgtttaaaggatgtaatatatattaaataaaggaaattttggagaggaattaaaatatttttttttttttattgtttttgtagtatttatttgtaatttttttataaaatagggtaggtaagtggttaggtagggagggagagtttttttgtttaatgtagggaagagtattgttttagttttttttttgtggatagtgttggaatgtgtattggtatttgggttttttaaaagtttgttagggggtattttattttatgttgaaatattgttttgtttagtggagttgttaagtggtatttgtggtgtaatatgaaaagtatgtattgtatatatttattaagttaaagatttttttatgaaggtatattaaaataatttttagtttagtaagtttagtttttgttattgaaaagtttagggtaataaaggggtgagatttttgttgaatttgtgtttgttatttttgtgtttttttttttttttttatatggttattattttgtaatagagatttattgtaagaaattttttaattataaagaaaatatatattttaagtaagagaatatagaggaatttataaaatatttaatatattgttattaaggtagttgtaaagatatataaagtattatattatgtgttaatttttatttggtttatgaggtttatggttttaaatgtttatttaaggtttttagagttttttggaaattgagtttatttttattggatagtggaggtggatgaaaagttgttagataagagaagaggaaatagttatattggaagtagagtaggagaaatttaagttagagatgagaaatatggtattattgataggtatgtgtgtatagggatttgttatttaggggaggttgttgtatatttttgtttaatatttttttaaagagtagagatgtattggttttagggaagtgaagatggggatgggtgtttttaaaattttgtttatttttattttttaagttatggaattagttttattgagtgagattattgtttttgaattttttatttttatattgtattattgtataaaaataataatattagtgtgtttttttttgtgtgtggtaaaggttgggtgatttgatgttttttttttttgtgtaagaaaatgtaaaatatataattattttgaagtttttaattgagaaatgaatttgggttttgaaatgaataattagtatttaaatttttatgaaaggaatagtatgggttttttataatatgataatatttgttagttaattaattattttttattatgaattaattatgttgatagtaataattagagttattatttaatttaagtattaatttataaaatagatttatgatttagttatatgttaattatttttttattagtaaatgtttatattttttgaaaatttgattttgtttttaaattttttattttaagtaaaatgaaggaaagatatataaataagttataattttttaaatatagatttgtgtattataaagattaatgagtagggtagaaagtgaaaaatagattgatttgtttgtaatgaaatgtaaattattgatatttattttaaatattagttatagggttggaagaaatttttttaaatatttttttgttatggtataaaataatattttgatatgtgttatttttattttttttgtgtttgattaatgatttaataaatgtatttttaattaataagtaaataaaaagtgaaaaataaaaagtaaaattttgagagtaaaatttattttgttttagagtaattgtatatttgttagtgtgatatagtatatttgaaatttataattataaaataaaaatttatagttagggtttagggtttatatttgtttttttggtttttgtatagtaattatttattggataatttagaaagaaatattatgaattatgttttgtaaatatgtttgaattggagagttttttgaagaaagagtagttgtgtttgtgtattgtattgtagttggttgtgtttaaaattgggttaatattttgtgatgtttaaataagaagatttttagaggtgtagatatatttttttttattataggggtagatatgtaaagtgtaggtagatataggtatagggttgggggaggtggatattgattgttttaaagatatgtttagtttttttatgttgttttggttttttgtttgttttttaattttttttttttgttaatttttttttgttatagttttgttagaagaataaatggttagtattgagtgatttgtgtgttttagtagggaagttaaggtagagatgttggtagtatgaggtaagtatgaggttttttttagggtttttatattagtaggtagagttgtttttgtgttggaagggagtgggggaagttttaatagtaataatatatggaaattttgtttgtggttttttagtatgaatatttgtttatataataggattgttgatgtttgtggattttatattaaaagatattaatgtattttttaaatgaatttgtaaggtggttttgggtatgagtatagtgattttttagaaattttagaaatatattttttttaaaaatgtttttttattttgagtgttggttattgtgttttttatttggtttttttttttttagttttttgtttttttagatttttttttataaagtttttttatttggttatatataaatattgtttttttaagataagggtatatttttttttttttatatttttgaattattttttttagtgtttttgtgttttttgttgttgatgatttataaagatagttttttaagtttaatagttttggttggttttaatttgaaagttaaatataatttttgttgaatgttttagtattgagtagtgagttgtgaattattttttagttgattgttattgttggtggtattgttttaatattagttttggggagatttatttttggttattttattttgtttatatttttttttttaaatttagatttttattttttttttttttttttaaaattttatttttatattttttattattttttataaatttagatttaagtaatatatgtttataaaaatttaaagttttgtttaaaagatataaagtgaaaagtaaaagttttttatatgtatttattaaatgttgaatatttattatgtgttaggtattttaattggtgtttggtatagatttgtatatttttttgggattgtgtgggggggtgttgtttgttgttattatattagtatggttttatgatatatattgttttgtaatatttttaaatttagtaatattttttgaatatttttttaaaataaa

SEQ ID NO: 270 - DNA, 2534 bp, Artificial Sequence
  chemically treated genomic DNA (Homo sapiens)
aggtaggaaagtgggatagttggggagttggattttattttttgtgagttttgttggtatttgatggtatgtggtttggagagggtaggtgatttggtgtggagggttagagggtaaatttttaaataagtggtaataggttattaatttgaaagggaaaattgtgtagtgatgggaaatgtgtttaataaatttattgggtgattaattataaaggttgggttggagttttagaggttgtttgttaaatattttattaagtggtattttgaaagttgttatttgtgtattttgggagtttagaggggattttgagggggaatgaggtttggaggatggaattatttttaggtagattgagaaggagtttggattttatttttaaatatagtttggagtttataggttagaggttttaatgggagaaaagttaaaggaagagggtgtagaaaggagttttagggaattggtggttatgtgattttgagtaaattttatttttttttgagatttagtgtttttatttttatggttttgtgtgtgttatagagatatggtggggattaaatttgattgtgatatgaaagtgtttgggaaattttatggttttatttaaatatgagttatttttatttgaattaaggggggaagttatttggtaggattaggaattttatttttttgaatttttatgggttttgttgaggttgaagtagttaggggttaaagttagtttttagtttttggaagggtattgtgaaagtggatttgatttgagaagttgttttttgatgtgggtagttatgtgatgttagttttgaataagagggggtagtttggagtttggaaaggtgttagtgtaggtggggtttatgtttagattttttttgttgattgttttgatgatttatttttatattttagtttttttatttttattgtagagttggaaagggtgtggggaagagaggagagggaggtaggttttgggttttggttttgttttttgtttttttttatttttttttgggtttggttatttagttaaaaggtaggttaagagtaggagagatatagagtttggtattggttttaggtagtagttagtttgttgtttgtttgtgtgtttttagagttatggagagagttagtttgatttagaaggttaagttggtagagtaggttgaatgttatgaggatatggtagtttttatgaaaggtgttgtggagaagggtgaggagtttttttgtgaagagtgaaatttgtttttagtagtttataagaatgtggtgggtggttagagggttgtttggagggtgttgtttagtattgagtagaaaagtaatgaggagggtttggaggagaaggggtttgaggtgtgtgagtattgggagaaggtggagattgagttttagggtgtgtgtgatattgtgttgggtttgttggatagttattttattaaggaggttggggatgttgagagttgggttttttatttgaagatgaagggtgattattattgttatttggttgaggtggttattggtgatgataagaagtgtattattgatttagtttggttagtttattaggaggttatggatattagtaagaaggagatgttgtttattaattttatttgtttgggtttggttttgaatttttttgttttttattatgagattgttaatagttttgaggaggttatttttttggttaagattatttttgatgaggttatggttgatttgtatatttttagtgaggatttttataaagatagtatttttattatgtagttgttgtgagataatttgatattgtggatggttgataatgttggggaagaggggggtgaggttttttaggagttttagagttgagtgttgtttgttattgttttgttttgttttttttagttttttattttgttgagaggattagtatggggtgggaggttttattttttttttttaggtgttgtttttgttttaaagggttttgtggagagggattggtagagttgaggttatttggggttggggattttattttttttgtagttgttgagtgtatttaattattggttatgtttttatttttgttttttgtatttgtttttttttgattttaggattaggttattttttttttttttttgttttttttttgtttttgttgtttttgattgtaggaattgaggagtgttttgttttgtggttgagaattggatagtggtaggggttggagatgggtgtgtgtgtgtgtgtgtgtgtgtgtgtgtgtgtgtgtgttagtgtaagattgagattgagggaaagtatgtttgttgggtgtgattatgtttttttttaataaagtttttttgtgatattttttttgttttttttttagtttttggtgatgggttgggagtgggattggaatttgatttagagattttgattttggatttttgagttagggttttgaattttttaggtggtttagtggtttgtatgtaagattttgagtttaggtgaggttggggttt

SEQ ID NO: 271 - DNA, 2534 bp, Artificial Sequence
  chemically treated genomic DNA (Homo sapiens)
ggattttggttttatttggatttaaagttttgtgtgtgggttattgagttatttagggagtttagggttttaatttagaggtttaaagttagggtttttaagttagattttagttttatttttagtttattgttaagaattggaagagagataggaggagtgttataggggaattttattgagaggaaatatggttatatttagtagatatgtttttttttagttttggttttgtattggtgtgtgtgtatatatatatatatatatatatatatatatttatttttagtttttgttattgtttagtttttagttataaggtgggatattttttaatttttatgattagaggtagtaggggtaggagggaggtaagaggaggggagaagtagtttggttttggggttgggaggaagtgggtgtggagagtaggggtgggggtatgattagtggttaggtgtgtttaatagttgtaagaagagtgggatttttagttttaggtggttttagttttgttagtttttttttatggagttttttggagtaagaatagtgtttaggggagaagggtggggttttttattttatattagtttttttggtagggtgggggattggagggggtagggtggggtggtggtgggtaatatttagttttggggtttttggggagttttgttttttttttttttggtgttgttggttgtttatagtgttaggttgttttgtagtagttgtatgatgagggtgttgtttttgtaggagtttttgttgagggtgtgtagattagttatggttttgttgaaagtggttttggttagagagatggtttttttggggttgttggtgattttgtagtggaagatggaaaagtttagggttaggtttaggtggatggggttggtgggtggtattttttttttgttgatgtttatggttttttggtaggttgattgggttgagttaatgatgtgttttttgttgttattggtggttattttggttaggtagtggtagtagttattttttatttttaggtagaagatttggtttttggtgtttttggtttttttgatgaggtggttgtttagtaggtttagtatggtgttgtatatgttttggagtttagtttttatttttttttggtatttatgtattttgggtttttttttttttgagttttttttgttgtttttttgtttaatattggatagtattttttaggtagttttttggttgtttattatgtttttataggttattgagagtaggttttgttttttgtaggagagttttttgtttttttttatggtgttttttatgaaggttgttatgtttttatagtgtttggtttgttttgttagtttggttttttggattagattggttttttttatggttttggggatatataggtgggtggtgggttaattgttgtttgggattaatgttggattttgtgttttttttgtttttggtttgttttttggttgggtggttaggtttagagaagggtggggaggagtagggggtgggattagggtttaagatttgtttttttttttttttttttttatattttttttggttttgtagtaaaggtaaaaaggttgggatgtgggggtgaattattagaatagttagtaggagaaatttgggtgtgggttttatttgtattggtatttttttaggttttaggttgtttttttttgtttggggttggtattatatggttgtttatattaggaaatggttttttaaattagatttatttttatagtgtttttttaggggttaaggattggttttagtttttggttgttttagttttgatagagtttataaaggtttaggaggatggggtttttaattttgttaggtaatttttttttttggtttaggtgaggataatttatgtttaggtagggttatggagttttttaagtatttttatattatgattgaatttaatttttattatgtttttgtgatatatataggattatagagatgggaatattaagttttagagaggggtgagatttgtttaaagttatatagttattaattttttgaaatttttttttgtattttttttttttagttttttttttattgaggtttttgatttatgagttttagattgtgtttggaagtgagatttaggtttttttttagtttatttgaagatggttttattttttaggttttatttttttttagggttttttttgagtttttagaatgtgtaggtggtagtttttagagtgttgtttaatgaagtgtttaataagtagtttttgaagttttagtttagtttttgtaattagttatttagtaggtttgttggatatattttttattattatataatttttttttttaagttggtggtttgttgttatttgtttgaggatttattttttggttttttatgttaggttatttgttttttttaagttatatgttattaggtattagtggggtttatagagggtggggtttagttttttggttgttttatttttttgttt

SEQ ID NO: 272 - DNA, 6558 bp, Artificial Sequence
  chemically treated genomic DNA (Homo sapiens)
taagattataaattgttttttattagtggggaaggttttaaatattatgtatttagtataagtaggtgtaattaattgtaatggtttgttttgttatttttgattaatatataattattaggttagaattgtattttataagttttttgtgtttagttattttgtatatattaatttttttaagttttgtgttttaaaagaattgtatagtgttgggaagttttttatttattttaatttttagggtattgagtttgaatttgaattaggtattaggtatgttttattattataaaagatgtaaaaagatgtgtatagtggtgtatatttatagttttagttattgaggaggttaatgtgggaggattatatgaggttgtagtgagttgtgatggtgttattgtattttagttttggtgatagtgagtttatgttttaaataagtaagtaaataaaaattaaaaagaatttagtttatagggtatttgaaggtaagaggaaaagatgttagaattagagatggggagaagatgggtttttggtgtttgttgaggttgagaaatgagatagataggttgagtgtggggtggagagaggatgggtagagagattgaggttggtttgaatggaaatgaaatgttagggtttttagggttattggggaataattggagtttttaggaaaggtttaatgttgtgattatttgtgtttgttatgtttttttattttttattaattgtgtgaatttggtagattttgagttttagtgtttttttttgtgaagtggggttattttattttaatttttgggattgttgtgtgaattaaatggggtaatgtatggagagtatttgatgtatagtgagtgttttaaaattttagtttgtattttttagtaaaggatatgtatatgtttattgtgagtgataaatttaggatgatttgaatttaatgtgataatgtgggtttttgtatgttggttatgttgttgggagatatttatggatttaattagtataataggggaaataaattatttaatgtattttgttaagatagaatattttagaatttattttgtggggtggggtataataaagggggtttttttgttgaaaatgtttaagtttaggtttgtggtattatttaattaaggttgatagttatatagtaagttagaggtaatgttaggatttaaattaaatttgtggtttttataatgaggttattttttttttttttgaatggtttggggaaagggggtgggtgggtagaatttggtagtggttaattttttatttttgttttttggtttttttttgtttttatttttaggtttgtattgattgattgattgagatagggttttgttttgttgtttaggttggagtgtagtggtatgattatggtttattgtagttttaaatttttaggtttaagtggtttttttgttttttattttttgagtatttatatttttaggtttttaaaatggtttttaggtatttggttgttgttttagatatttatttgggtttttgggtagggattgtttgggaaattttatttatgtgaagtaggtgtgggtgtaggaaggttgtttggaaatgaattagtattgttttttgtttgagttgtaagtagggtgttagagggtttggtggataagaaagggaggatgataggaggttggtattgtaatgatatgttttagttattagagggtatgaagtagttgggtaaaattttgtggggttgttggtggaaaatttttggtatttggagtttggagatggggtggatggaatgtgaggatttagttttttgaggttgggttggggtagagttattgttttggatgtttgtagggtttgtttgtgttttgattattttgtttttgtagatagttggagaatgtgagagtgggattgggattggattttaggggttattttgtataatttttttgttttgttgtgggggagggagttgtttaaggttatgtagtaagttagtggtaaatgaatatgattattattagttttaggtatatggttatttgatgggtgtagttgtagttttagtttttgagatagagatatttgattaaggataggtttttaggagttgattttagtgatttgtggttttgttgttgtttttgtttttttttttggtttttttatttgattgattttttgttttttttgtttgtttgtttgtttttgtttttgtttgttggggggtttgtttaatttttttattgggttttgggagttgtagttttttgttgttattttttagggatttgtagttttttgaagtttttttttgatttgttgttttggttttatttttgggatttagaggagaggtgattattttgtagtatagttagtggtgtgattttatggggtgagaaggatttttttgtttttaagtatttttttagtgatttttgttgttatgtggtagttgtaagtattggttggtatttggtgtgggtgagatttttattttatgtagaaatgagtaagattggtgagtttattatgtgggggtgaggttgagagaaaataagtatataggtgatttagttaaaattagaattttttaagtatatatgaaaagggtaaaaggggtgttttgtataggatagaataggtagatattgaatttggttgggttttgggaaggttttttgtagtggtttttgaagggggggttggattttagtaggatagagggtatgggtatgtgtgggtatgttttgaatagaggggttagtgtaagttgagggttttggttatattagttgtatgtgttggtgtgtttaagggatatgtagtagtaggttgagtttggagtgttttattgttaggttttttaaaaatttttaattttaatttaattttattttatttttattttaagttttggtatatatgtgtagaatgtggtttgttatataggtatatatgtgttatggtggtttgttgtatttattaatttattatttaggttttaagttttgtatgtattaggtattagttttaatgttttttttttttttgtttttatttttttttttgtaattgtttataggttttggtatgtggtgtttttttttttgtgtttatatgtttttattgtttaatttttatttatgagtgagaatatattgtttggttttaagggatagttatggggatgtattgtagtttttgagtagggaaggttttgtggaggtttttagttaaaaggaaagaatggttgtgaaaattgatgtattgtgtttttttgttttttatttttagtgtgaagggtttttattttgagttttatttgaagtaggttttgatgggaagataagtagtatgaggggtttaagtattgaggggagtaagggatatttggtggttgtgttaaggtgtagaagaggatattgggggttttaaggtttgattttatgtatattgtttaggttggtttttaagttatatggtgattgttaggaagggattagtttgtttttagtttgatttttttgttatgttattatttaaagttttttttggtagggtttgtttggggtttttgtgttagtgttttttttgttaggttgggttggggtttttatttattgttttgggattgttgttgttttggttttgggggaggagggtgtgttgttgagttattgtttgggtatttgggtttggaattttgggtgagttatttagggttgaggtagaggggttgggggaggggaagaagttatttgatagttggagtagggaggggagttggggttataggaagggtggtgttttgatgtttagatgggttgggatagataaagggttaaggaggaaggggttttgggagggggtagtttttttttgggttgggttttgaatggttatagtgtttgtttttttttgggtttggggaggatatgtgtgtggggggtagtgagagagggttgtggttgagggttgtgttttaggtttggattttggtttgggaagttgtttagttggtgtttttagttttgggtagggatgtatttttatttatttatttagtttttaagttggagaagaggaggttaaagtttttttgtttagtttttaattatttgggatttttttatgttttttatagattgtggtttagtttaattgtggttgtgtgtagagtaattttattttttattgtttttttatttttttagatatttttttatatagagggatttttttaggtatttttaagtatatttagttattttattattttattaagaggtattttggtgttggttattaaaagttattttattttatttatgttttgaagttagttttgtttttttttttttgatgttttttagttgttttttttggtttttagttttttaagggtggttttaggttgttttttttttatatatataggtgtatgtatgtatatgagtattggattatgaagttttagtgtgtgtttatagttttttatataggagtgggttgtgatttataggtatgttatgagaatgaggtttggtattagtttttaggttttagagtaggggttgtttttttttattttggtttaggatgtttagtttttatgatattttttattttttattgtggtttgggtgggtttaggggttgtttttgatttggtttagagtttttttttagttggtggtggagttggtattttttgggagggagggggttgggagggaatgagtgggaatggtaagaggttagggtttggtgggattaggttgaggtaggtttggtttttttaaaatgttaagttgggggttagtggggtttatatataaatttttattttgggagtttggttgttttgtttttttttttgggtttgtttttgttatttggtttggtgagtatttttgttttgttgagggtagggtggggaggatttttgtgggtttttgtttttgtttttatagtttttttattttagtttttttggtgggattaatttgggtttttttgggtttttttttttggaagaattttttgtgaagtgttgaagtgttgattgaagggttttttttttttttttttttttttgagatggagttttgttttgttgtttaggttggagtatagtggtgtgattttagtttattgtaaatttttttttttaggtttatgttatttttttgttttagttttttgagtagttgggattgtaggtgtttattattatgtttggttaatttttttgtatttttagtagagatggggttttattatgttagttaggatggttttgattttttgattttgtgatttatttattttggttttttaaagtgttgggattataggagtaagttattgtgtttggttgattgaagggtttttttttaggtttttttgtgaggttttagtgtaggggttgttttgaggtttttttttggatattttagtttaggggtttttttttgggggtttaggtttaggagtaggaggtgtgtatgtgggtgttgttgtaaaaagaattttgagatttttttttttttttttttttttttttgtaaagttttggattttagtaggattaaggtgtaagaggtaggggttttaagattttgtttgggttatggttttaagtagtaaagttttgttttttgttttggtgaaggtagggttggtatgatgggtttagggtatgttttgtttttggtatagtttttttggttttattttgaaatttgtttaatttttttaggttggtttgagtatttttagaggttttgttgttgaggtttgttttattttgattttaaggtaatgaatattttatatttttaattttaattttaataggattttttttggtggagagaatgttaagttgtttttattttatttatgtttttgtttgtttagaggtttaggggtttttagggtgaggggagatatattttttattttttgggagtttttagtttgagagaggaaatatttttgtttaagggagtttttagttagatggtagagagagatgtttttggttttaggagttttgagtttaaggagggaaatgatttttttagggagttttttgtttttaggttgtagttatggtttttgttagattgtataggagtttttatttgttagttggtgtatgtggttttgttttttagagtttgtgtagatgttattaaaatgggattttggttattttgttattttttttttggtagatattaaaatggggagttttgtttttaggggggtgttttaagtgttattagaggaggtttggtgatttttagatataagggaagttttagtgtttgtttttagggtgagatggaggtattgtttttggttttagggaattatagtttgagggggagatgtagtttttgtttttttatttagagaggggttttgtgaggtggtttgggggtatagggtagaagtggattttataggttgagttaaggttttaagagttttagtagtgtatttattatttggtatttttgtagt

SEQ ID NO: 273 - DNA, 6558 bp, Artificial Sequence
  chemically treated genomic DNA (Homo sapiens)
gttgtagaggtgttaggtgatgggtatattgttgaggtttttggggttttagtttagtttgtaggatttatttttgttttatgtttttaagttattttataaaatttttttttgaatgggaaggtaggggttgtattttttttttagattgtggttttttgaggttggaggtgatatttttattttattttgagggtagatgttaaagttttttttgtgtttgggagttattaagttttttttgatggtatttgggatatttttttgagggtagggttttttattttagtgtttgttagaagggaaatgatagggtgattagagttttattttgatggtatttgtgtaggttttggggagtagggttatatgtattggttggtagatgggggtttttgtgtagtttggtaggagttatggttatagtttaggagtaggaagttttttgaaggagttgtttttttttttagatttgggatttttgaagttagaggtatttttttttgttatttaattggaagtttttttgggtaggagtgtttttttttttagattaggagtttttagagggtggggaatgtgtttttttttattttgaaggtttttgagtttttaggtagataggggtatggatagggtgggggtaatttaatattttttttattaggaaggattttgttggaattagaattaaagatatgaaatgtttattgttttgggattaggatgggatagattttagtggtaaggtttttgagaatatttagattagtttggaaaggttaggtaggttttagggtgaggttagaggagttatgttagaggtagggtatgttttgggtttattatgttagttttgtttttattgaggtagggggtagagttttgttgtttggggttatgatttaggtagagttttgagatttttgttttttgtattttagttttgttagaatttaggattttgtaaaaaaaaaaaaaaaaaaaaaaaaaaattttaggattttttttgtagtaatgtttatatgtatattttttgtttttaggtttagatttttaaagaagggtttttagattgagatatttaggggagggttttagagtaatttttgtattgagattttatagaggaatttggagaaaaattttttagttggttgggtgtggtggtttatttttgtaattttagtattttgggaggttgagatgggtggattatgagattaggagattgagattattttggttaatatggtgaaattttatttttattaaaaatataaaaaaattagttgggtatggtggtgggtgtttgtagttttagttatttgggaggttgaggtaggagaatggtgtgaatttgggagggggagtttgtagtgagttgagattatattattgtattttagtttgggtgatagagtgagattttattttaaaaaaaaaaaaaaaaaaaaaaaattttttagttaatattttagtattttatagagagtttttttaagggggaaggtttagagaggtttaggttgattttattagggaagttggaatgagagaattgtggagataaagatagagatttatggggattttttttattttgtttttagtaggatagaggtatttattagattaggtggtagagatagatttaggaaggagagtaaggtagttaggtttttagggtgaggatttatatgtgggttttattggtttttaatttggtattttaaggaaattaaatttgttttaatttgattttattaaattttggttttttgttatttttatttatttttttttagtttttttttttttagagagtgttagttttattattagttgggggagggttttaggttaggttaagggtagtttttgagtttatttaggttatagtgggaagtgggaggtgttgtggggattgggtattttggattggggtgaggggaggtaatttttgttttggggtttggagattggtgttaggttttatttttatgatatgtttgtgagttatagtttatttttgtgtgagaggttgtgagtatatgttgagattttatggtttagtgtttgtgtatatatatgtgtttgtgtgtgtgagagagaagtaatttggggttatttttaggaagttgggggttagaggaggtagttgggggatattaggaggagaaggataggattgattttagggtatggatgaagtggagtgatttttaatggttagtattagaatattttttaatgaggtaatgaggtaattaagtgtgtttagaaatatttgggaaggtttttttgtgtaggaaggtgtttggaaggatggggaagtagtgagaaatggggttgttttatatatagttgtagttgggttgggttatagtttgtggggagtataaggaagttttgagtagttaaaggttgaataggaaaattttggtttttttttttttagtttgagggttgggtgggtgggtaggggtatatttttatttaaggttgaaaatattagttggatagttttttaagttagaatttaggtttgaagtatagtttttagttatagtttttttttattgttttttatatatatgttttttttagatttggagaaaggtaaatattgtggttatttagagtttagtttaagggagggttgtttttttttagggtttttttttttttggttttttgtttattttggtttgtttgggtattagggtattgttttttttgtggttttagtttttttttttgttttagttgttgagtagttttttttttttttttagtttttttattttagttttaagtgatttatttgaggttttaggtttagatgtttaggtagtgatttagtggtatattttttttttttagggttagggtagtagtagttttagagtagtaggtggaagttttagtttagtttggtagggaaagtattggtatagagattttaaataggttttgttaggaggagttttggataatgatatggtaggaggattagattgagaataggttggtttttttttagtggttattgtgtgatttgggggttagtttgagtagtgtatatgaagttaggttttggggtttttagtgtttttttttatattttggtatagttattgagtgttttttgttttttttagtatttgaattttttatgttatttgtttttttattgaggtttattttaagtagaatttggaataaaaattttttatattgagggtgagggataagggagtgtaatgtattgatttttatagttattttttttttttaattaagggtttttatagggttttttttgtttagaaattgtagtgtatttttatggttgttttttaaagttaggtggtatgtttttatttataagtgggagttgaataatgagaatatatggatatagggaagggaatattatatattagggtttgtgggtagttgtggggagaaggatgggggtaaggggagggagagtattaggattaatatttgatgtatgtggggtttaaaatttagatgatgggttgataggtgtagtaaattattatggtatatgtatatttatgtaataaattatattttgtatatgtatgttagaatttaaagtaaaaataaaataaaattaaattaaaattaaaaatttttaaaaagtttggtagtgaggtgttttagatttggtttgttgttgtgtgttttttaaatatattggtatatgtaattagtgtggttaagatttttggtttgtgttgatttttttgtttagaatgtgtttatatatgtttatgttttttattttgttgaaatttaattttttttttaaaggttattgtagggagtttttttagggtttaattggatttagtgtttatttgttttgttttgtataaagtgttttttttgttttttttgtgtgtatttagagaattttgattttgattgaattatttgtgtatttgtttttttttagttttatttttatatggtgagtttattggttttatttatttttgtatgaggtaagggttttgtttatattaggtgttaattagtgtttatggttattatatggtaataggggttattggaggagtgtttaggagtaagggagttttttttattttgtgaaattatattattgattatgttatgaaataattattttttttttggattttaagagtggaattgagataatgggttggaaaagagttttagagagttataaatttttgaggagtgatagtaggaaattgtggtttttaggatttagtgagggagttgagtaaattttttagtgggtagagatggagataggtaggtagatgaagaagataaagagttagttagatggaaaagttagggagaaaaatagagatagtagtagagttgtgggttattagggttagtttttgaaggtttgtttttaattaggtgtttttgttttaggaattgaggttgtgattgtgtttattaaatggttatatatttgagattggtgataattgtatttatttgttattaatttgttgtgtaattttgggtaatttttttttttatggtagggtaggagagttgtatggaatggtttttagagtttgattttaattttatttttatattttttagttgtttataaaggtagagtagttaagatataagtaggttttgtggatatttaaagtagtgattttgttttggtttagttttaggaagttgggtttttatattttgtttattttatttttgggttttaggtgttagaaattttttattagtggttttgtgggattttgtttagttgttttgtgttttttggtggttaaggtgtgttattgtagtgttggttttttgttatttttttttttttgtttgttagattttttggtgttttgtttatgatttaaataggagatagtgttgatttatttttaagtggtttttttatatttatatttgttttatatagatgaggttttttggatagtttttgtttagaagtttaggtggatgtttgagatggtagttagatatttggaagttattttaaaagtttagggatatgggtatttgggagataggaggtggaaagattatttgagtttaggagtttgaggttgtagtgagttatgattgtgttattgtattttagtttggatgatagagtaagattttgttttaattaattaattaatgtaagtttagagataagggtaggagaaaattaggggatagaagtgagggattggttattgttaagttttgtttatttattttttttttttaggttgtttaggggaaagagaaatggttttattgtgggggttataggtttagtttaagttttgatattgtttttggtttattgtgtgattgttgattttggttgagtggtgttatgaatttgagtttaaatgtttttagtagaaggattttttttattatgttttgttttataaaataagttttgaggtattttgttttagtaaaatgtattaaataatttattttttttgttgtattaattggatttataagtgttttttggtagtatgattagtatgtgaggatttatgttattatattgggtttaggttattttggatttgttatttataatgggtgtgtgtatattttttgttggggggtgtagattgaaattttgaagtatttgttgtgtgttaggtgttttttgtatattattttatttaatttatataataattttaggagttggaataagatgattttattttatagaggagaatattgagatttaaagtttgttaaatttatataattagtaaggggtggggaggtatgatgaatataggtggttataatgttaaattttttttagaagttttaattattttttgataattttgagagttttaatattttatttttatttagattagttttagtttttttgtttattttttttttattttatatttagtttatttgttttattttttaattttagtaggtgttagaagtttattttttttttatttttgattttggtattttttttttttgtttttaaatgttttgtggattggattttttttaatttttgtttatttatttatttgagatatagatttattgttgttaaggttggagtatagtggtattattatagtttattgtagttttatgtgatttttttatattaatttttttagtaattggggttataggtgtgtgttattgtgtgtatttttttgtattttttgtggtgatggagtatgtttgatatttgatttgaatttgagtttggtattttaaggattggaatgggtaaagaattttttagtattgtatagtttttttaaagtataaagtttgggagaattaatatatgtaggataattgaatgtaagagatttgtggaatgtagttttaatttgataattgtgtgttaattgggagtaataggataggttgttatggttggttatatttatttatgttagatgtataatgtttggagttttttttattgatgagaagtaatttatgattttg

SEQ ID NO: 274 - DNA, 1334 bp, Artificial Sequence
  chemically treated genomic DNA (Homo sapiens)
aagtgatttttttgatttaatttttagagtagttaggattataggtatttgtattatgtttggttaatttttgtattttttttttttgtagagatggggttttggttatgttggttaggttagttttaaatttttgattttaagtgatttgtttgttttggtttttaaagtgttgggattatagtgtgagttattgtgttaggtttataattttattattaaaattaattttattgtaaaagaattagtttaggtttagatggaatgggttttatgagtttttttttttttttttgtaaggttatggtggttattttgtgagttattgttgttaggttaagtttttttttggttattttttattatgaattatttttgtagtgagtatagtatttattttggtgggagggttttttagatatgagtaggatttggattaaggttaggttggaggagatttttatgggaaagagggattttttgaattttagattttttagttaagatgattttattatatgttgtttttgtttattagtaaatttttttatgtagtttgattatgtttaggaaatatttttgataaaaattagtggagattattgttttagaggatttttgggtttttttaggtaaatgttatttaatgttttttaagtaaatagagtttgttttataaaatttggggtttgggtggttttttatttttgatttggggttgtttttggagtagagaggaggtaatggttattatggagaataaggtgatttgtgttttggttttggtgtttatgttggtttttggtattttggttgaggtttagataggtaaggtatgtttttttttgttttgtggggttatagttagttttggtagtttttgttaggagttattgttttatatatatatttttgagtatttgttttgtgttaggtgttgttttaggtttttaaaagtatatttaatttataggattggtaaaagtaggtggagagtaatttagggtggtagggtttttggagatttttgagaaatgtgatgaggagggggttgtttttagttggggttgtttttttgtgttaggaagattatataatttttttaagtgttatgttttaaagaggaagtgttggtgtggggttttagaatagtgtttttgattgtttatgttaatgttttttttaggggtagatttttttagggtttatttagataggtttaaatgttggttttagtgatggttatttaggagatttttttttataggtttgaatgtttattttagtggtggttaattgggagatttttttttataggtttttgggtttttttt

SEQ ID NO: 275 - DNA, 1334 bp, Artificial Sequence
  chemically treated genomic DNA (Homo sapiens)
gaggggagtttaggaatttgtaggagagggttttttagttggttattattgggatgggtatttgggtttgtgggagagggttttttaggtggttattattgggattggtatttgggtttatttggatgggttttgggagggtttgtttttggggaggatgttggtatgaatagttaaaagtattattttgagattttatgttaatattttttttttgaaatatgatatttgggaggattgtatagtttttttaatataggaaaatagttttgattgaaggtagttttttttttgttgtattttttgaaggtttttgggggttttgttattttgagttattttttatttgtttttgttgattttgtaaattggatatatttttaagggtttagaatagtatttggtataaaataggtgtttaaaaatatgtatgtaaaatagtggtttttggtggaggttgttagagttggttgtggttttatagagtaggaagaagtatgttttatttgtttgggttttggttagggtgttgagggttagtatggatattaggattagggtgtagattattttgttttttatggtggttattgttttttttttgttttaaaggtgattttgagttagggatgagaggttgtttgagttttggattttatagggtaggttttgtttgtttaaagagtgttagataatatttgtttaaggaggtttggggattttttgagataataatttttattgatttttattaaaggtgttttttagatatggttaagttatatggaaggatttgttgatagatagagatgatatgtggtgaggttattttggttgagggatttgagatttagaaagttttttttttttatgggagttttttttaatttgattttaatttaggttttatttatatttgagaggtttttttgttagggtaaatattgtatttattgtagaagtgatttatagtgagagatggttggaaaaaggtttggtttgataatagtggtttatggggtggttattgtgattttgtagggggaagggaaggagtttatgaagtttattttgtttaggtttaagttaatttttttatagtggaattggttttaataatgaaattgtaggtttggtgtagtggtttatgttgtaattttaatattttggaggttaaagtaggtggattatttaaagttaggagtttgagattagtttggttaatatggttgaaattttgtttttataaaaaaaaaaaatataaaaattagttaggtatggtgtgggtgtttgtaattttagttattttggaggttaagttaggagaattattt

SEQ ID NO: 276 - DNA, 6432 bp, Artificial Sequence
  chemically treated genomic DNA (Homo sapiens)
tattatgtttagttaatttttgtatttttagtagagatagggttttataatgttggttaggttggttttgaaattttgattttatgatttgtttgttttggttttttaaagtgttggaattataggtataagttagtatgtttggtttatattttttaattgtatgtataatttaatttgtagatgattttaaaagtttaaattggagttttattgttttttttatttttagtttttataataaattttatgatagtttttgtttataagaatttttttgtagttttattatttgtaaattatttaattttgtttttttgtgattttttattttttatattttttatattttttagttattgttttaaaaattttggataataaattaatttaaatttttttttaaatggtatttatttatttttatttagatttatatggattggttagaggtaggtttgagattggttgatggaggtttggtttagatttaattaggaggttggtttatatttgttttatatgtttttttttttttttgtatttgttggtttttaagtgtttttaattgaaaataattagtatattaaagtagtatattttggagtggtattttttgaaattttttattggttaggtggtgaagattaattatttgattaatttgttttagagtgtagaataagtttggaattagataggattaagtttaaatttgggttttgttttttattagttatgtgatttttgttaaatatttaatttttttaatttttaaattttttatttgtaaagggaagattagaatagtattgtaaggatatgttttaaaatttaataaggattatttttggataatagggttaagaatttttttaaagtttgtttttaaaaaaaaaatttaaattttttatttataattaatatgtattatttttgtaatttttaaaaagttattttttttaaaatatattattgatgttttttgtaaatatgtggtataattgtaggttttattaatatttgtgaagaattgtaaataagagaatggattaggaaaattgatatttttatttttttttttattgaagataagaaatatatattgaatattgattatttgtagagtatggagtgtggttttatattgaaaaaggaatattttgtgtttttaagggttttataattattagggtagaattttaaaaagtaaataaataataataatgtattttatgttagaatggggtaaatatttttttttaaaaaaaggttaaataaatgaaatgttttttgggttatttttgggaaaggagtgattatagtaggtgaagtattataaaatattttttggaggaggtagtattatggatgatttataaagggtggatgatttttataaattaattatagttttagtgtttattggtttgttttataataaaaggaaaattggttaagagataagagttgagaatgaggttggttaatttataaggagaggaatttttttgttaattgttttagttgatagtaattttaatagttgtatgttataaagtttaggggagtaggaagttttttttttattataattgagaaatttaatgtttaaataaattataatttgatttagtttaattgtgtgtgtttgtgtgtgtgtgtagagtttaaaaagttggtaaaatagattgttagtttttaaaatttttgtttaagttgatatttattgttttttaatttattaagggtttaaatgttattttttttgttttttaaattttgagttgggttattatttttttgtttttatttgtaaatggtttagttttttatatgtatatattaattgtttatgtgaatatataaaatattatattaagttaaatatataattatgtgtgaaaatgatgttttgattaagggtattagatattttttttaataagaattttaaaaggaagggtattatgataattttttttttttttttttttatttattttttgtttttgagatagggttttattttgttttttaggttgaagtgtagtggtataattatggtttattgtagtgtttgttttttgggtttaagtgatttttttattttagttttttgagtagttggtattatagatatatgttaatatgtttggtttttttttttttttttttttttttagtaaagatgaaattttattatgttgtttaggttggttttgaatttttgggtttaagtaatttttttatttagattttttaaagtgttgggattataggtgtggattattgtatttagtttgatgaatttttaaaattattaaattgtaatatgtatgagtttatatatttattatttttattatgatgatttttaaaaggttagtttgtatttggtaatgttgaattttgattttttttaattttataggagattggagattaaattagaaatgttaagggtaaataaaattaaaattaatattaatgatgtattatggtaaagattattagttaaatattttattatagatttaaatatttagtttttaataatgtaaaatatttttgtgataattaaggaaaataaagtttttggaatttattggatatttatttgttatattgtgtttttaggagaaagaaagtatatgtttgttatttggaggaatttgggtaaatgtaggaaaaaaaaaagaagaagaaagaaatttatatatttttttatttttaagaaaaggaagtagtggtgatattatttttggttaaaatgtagtttgtttatattttaaatatttggtaataatgttttttttagagttatgaagtaattagaataattaaatataatttttttttaaatttttattgtttgatttatttatttatttaataaatatttattaaatattgattatgtgtttgatgtttagggatataatagtaagtggagggaaagatatataatatttgtttttaagaaatttggagttgagtggaggatagaaatataaattaaagaatgatataaataattataaagttatagttgttaaaagaaaagtatatggtgttaagagaatgtgtaatataagatttatttatggaggtgagggaaagtttgtttattaaagaagttatgatttaatttatgaagattaggagttggttgggtgaagaaaaaaaggttagaggaaggaagtttatattggggaaggttttaagtataaagggtaggaggattatagaggtatatttatgaaatttggagaaggtttttagtaagtaaggagaagttaaatgaaagtttatgggagagttggaggtttgaagatatgtttaaggatttggtttttattttttttttattttaagagtagtgggaagttattaaatgattttaattagagggttggtataattagttttgtattttgaaaagttgaatttagtttttgtttgagaaattgagtgaaagagtttagaatggttgtggttgagggtgatttgtgggagatttttatataagttatggtagtggtatgggttggtggtagaagagggaatagggagaagatttggaatttaatttttttttattgataaagttattttagttttggtaaggtaattaattggtgggaaagaagatgtttagtttttttgattttattgtattttttgtatttttaatatgagtattgggaagtggtaaaatatttagaggtagtttgggtgttaggtggagtatgagttaaaattttaggatgaagtaaatgaatatttagaatgataggaaagatttgggagttgggtttgggggagggttatttatttttattttttggagattttggtataaatttttgtttttgtaattttttttttaggtaaaggaatttattaaatgaattgttagaagatttattgattagagggttgtatagaattatatttttgagagtgggaagtaggttgattatatagtttattatttaattaggatatatttgaaagagaaagggggttttattaatatttaaattataaaatatgtatattaggaatgttttgggtaaatttggttgttttagtaagaaaggaaatttgaaagtttatattgttttgtttttatgttattttgtttgtatatgagagggtaagtattttttttttttatttgtattaagggaataaaagtataagtatttaggtgatttttaatttatttttaattttatagtttttgttatattttatatattttgaaaattatattttttattattattattttgtgataggtgattatttataattatttattgatttagttttgggaagaggtggtgtaaaatgggatgttttatttaggtgtttattagaaatgtagaatttttgtttgttttttagatttattgaattagaatttgtatttttaaataagatttttaggtgattaatatgtatattaaaatttgagaaaaatttttagattttgatttaaagaaaaatattttataatttgatagtgtatgtatatatatatatgtatatagatataattgaagtataaatttaatgaagtagaatttattgttattattttatttgggaaagaaatgtgtttgtgatttaatagattggagtatttatttttggattttaatttgtaatttgaaaatgtatttttaaagtatttaggagtaatttgaagaaagttgaggggaggtggtagatgttttgatttattagggaaaatgtggatgttttttgttgttattttgtgaattgtgtgtatttagttatttttgagtaaatatttggagtgaggaatttttgagtggtgtgggagggtggtgaggggtagttgaaagttggttaaagtttttggaggggttggtttaggaaatatgattggtagttatgagagagttaggggttggatgttgaggagagggagaaggtttttgggtggagagaggttttgtttagttgttggtgaggagttttttgttttttttgtagtgttgagttgaagttgagtgagttatttgtgtgtatggagtgatgatatttttgtgtgtgtatttgtttgggataggagttggatttttgtgtagttttttttggttgttgggggtttttttgtgttttgttggtttttaggtttttttttggttggtgagtgggtgttatatttggtttgtatatttgtgttgttggtttggtgtggggtttggagagggtgtggtgtggaggtgtagttaggggtttgggaaggtgttgtttgttgtgttgggggtttggtttatgatgagtagtggggtttgttatgggttgggggttgtttaggggtttgtggttgttgtatattgttttgtggatgtgtattgttagtatgattttattgtatgtttagaagttgggtgagtggtttttagtttgggtttggtggggtgttgggggtttttttggggtttttgtttttttgttgtgtttgatagttgggtttggtaatttggtttttgggtggaaatgaggaaagttttttttgtgatatttatgtagtttgatttttgtagttgtagggattgtgagttttttttgaaaaagagaaggaaagtttagttgtaaggggtgtggggtatgtttggttttttttgtgtgagtaggaaaggtgttgtgttggttgtgtttgaggtgagtttttatttttggaaagggaagtttgagaagttggttatttgaaggtggttggggagtagtggtttggagtggtagtttgagttgttaaagtagttagtgtatttgggttattttgtttatggtgatgttgtgtgtttatttagttttttttgagttatttgtttaaaaggttagttttttagtttttagtttttggagatggttatgtttttttttaggttggttttttggtttggagtttttggaaataagttttaagaaaataattgatttttaaaagaaagttagttggttttattgatgttttggtatggatggatagggagtggagatgtttaggtgaaattgagaattttttattgaatgtttattgggtgttagaggttgtagattttgtttggaataagatagttttgtttttagggagttgatggttttatgtaattattgtttgttggaaattgaagggttaaaattttaattaggttatttatttgattgttgtttttgaaggtttttaaggaaaaaataaaaataaaaaaatatatatatatattatatatatataaatatatatataattatatatataaatatatataatattaatatatatatgtatgtaggaatgggggtttttaattatttgttatggaaagtgtaaaatttttgagattttaaaagttagattttttttttttggagatggagttttgtttt

SEQ ID NO: 277 - DNA, 6432 bp, Artificial Sequence
  chemically treated genomic DNA (Homo sapiens)
agagtgagattttgtttttaaaaaaaaaaaatttaatttttgaagttttagaggttttatattttttataataaatagttaagaatttttatttttgtatgtatatatatattaatattatatatatttatatatataattatatatatatttatatatatataatatatatatatatttttttatttttattttttttttaaaaatttttagagatagtgattaggtgggtagtttagttaggattttaattttttggtttttaataaatgataattgtatagaattattaattttttgaagataggattattttgttttaggtaaaatttatagtttttagtatttagtaggtatttagtgagggatttttggttttatttgagtatttttattttttatttatttatgttaaggtgttagtggagttagttaatttttttttggaaattgattatttttttgaaatttgtttttaaaaattttgggttaagaagttggtttgagggaaagtgtggttgtttttaggagttaaggattgaggagttggttttttgaatgggtggtttaaaaagagttgggtgggtatgtggtattgttatgggtggagtggtttaggtgtgttggttgttttggtagtttaggttgttgttttgggttgttgttttttggttgtttttagataattaattttttaaatttttttttttgggggtgggggtttgttttgaatgtggttaatataatgttttttttgtttgtataaaggggattaaatgtgttttgtgttttttgtaattgaatttttttttttttttttaagaaaaatttataatttttgtagttatgggagttgggttgtgtgagtgttgtgggggaaattttttttgtttttgtttgggggttgggttgttgggtttgattgttaagtgtagtggagaggtggggattttaggaagatttttggtgttttgttgagtttgggttggggattatttatttgatttttgaatgtgtggtgggattgtgttggtgatatgtgtttataggatgatgtgtagtggttataggtttttgagtagtttttgatttatggtagattttgttgtttgttatagattgagtttttagtgtagtggatggtgtttttttggatttttggttgtgtttttgtgttgtgttttttttggattttgtgttgggttggtagtgtagatgtgtgggttagatgtggtgtttgtttgttagttaggagggggtttggaggttggtgaggtgtggggaggtttttggtggttgagggaagttgtataggagtttggtttttgttttgagtgggtgtatgtgtgggggtgttgttgttttgtgtgtgtgagtgatttatttaattttaatttagtgttgtgggggaaataggaaattttttgttaatagttgggtaggatttttttttgtttgagagttttttttttttttttgatgtttagtttttagtttttttgtagttgttaattatgttttttagattagtttttttgagagttttggttgatttttagttgttttttattgtttttttatattatttaggagttttttgttttaagtatttatttaagaatgattaagtgtatatagtttataaagtaataatagaaaatgtttatgttttttttagtagattagaatatttgttgtttttttttagttttttttagattgtttttaggtgttttagagatgtgtttttaaattgtaagttgagatttaggagtgaatattttaatttattgagttgtgagtatattttttttttaaataaaatagtaatggtaaattttattttattaaatttgtgttttagttgtgtttatatgtatgtatgtatgtgtatatattgttaagttgtaaaatgtttttttttaggttgaagtttagaggttttttttaagttttaatgtatatattgattatttggaaattttatttaaaaatgtagattttaatttagtaggtttaggaggtaggtagagattttgtatttttaatgagtatttggatagagtgttttattttgtattgtttttttttgggattgagttagtgagtaattgtaaatgattatttattatgaagtgatagtggtgggaaatgtaatttttagaatgtatagagtatagtagaaattgtaaaattaaaagtgggttgggagttatttgaatgtttgtgtttttatttttttaatgtaggtgaagaaagagaatatttatttttttatgtgtaaatggggtaatatgggagtagaatagtataaatttttaaatttttttttttgttagggtaattagatttgtttaagatatttttggtgtatatgttttgtagtttaaatattaatagaatttttttttttttttagatatgttttgattggataataaattatgtgattaatttattttttatttttaaagatatgattttgtatagttttttggttagtagattttttagtaatttatttaatgaatttttttatttgagaggaagattgtagaggtaagggtttgtgttagggtttttagggaataaaggtaaatagtttttttttaaatttaatttttaaattttttttgttattttaagtgtttatttgttttattttggaattttaatttatgttttatttagtatttaagttgtttttggatgttttgttattttttagtatttatgttgaagatgtagaaagtgtagtgaaattaggagggttaggtatttttttttttattaattaattgttttgttaaagttggagtgattttgttaatggaggaagattgagttttaaattttttttttatttttttttttgttattagtttatgttattgttatggtttgtgtaggagttttttatgagttatttttagttatggttgttttgggtttttttatttagttttttaaatgagagttgaatttagttttttaaaatataaaattagttatattaattttttgattaaaattatttaatggttttttattgtttttgagataaagagaagataaaaattagatttttgaatgtgtttttaagtttttaatttttttgtaaatttttatttggtttttttttgtttattgaaagttttttttaaattttgtgaatatgtttttgtaatttttttattttttatgtttagagttttttttagtgtggattttttttttttgatttttttttttttatttagttaatttttggtttttgtggattgaattataatttttttgatgggtaagtttttttttatttttatgagtagattttgtattatatgtttttttggtattatatgttttttttttaatagttgtaattttataattatttgtgttattttttaatttatatttttattttttatttaattttaaattttttgagggtaggtattatgtatttttttttttatttattattgtgtttttaagtattaaatatataattgatgtttaataaatatttgttggatgaatgaatgaattaggtaataaagatttagaagaaaattgtatttgattgttttagttgttttataattttggagaaaatattgttattgaatatttgagatataaatagattatattttagttgagaatgatgttattattattttttttttttaagaatggagaagtatgtgggtttttttttttttttttttttttttttatatttgtttaagtttttttagatagtaaatatgtatttttttttttttgaaaatataatgtggtaaataaatgtttaatagattttaaaagttttgttttttttaattattataaagatgttttatattgttggaggttagatatttaaatttatggtggaatgtttaattggtggtttttgttatgatatattattaatgttgattttaattttgtttgtttttaatatttttgatttaatttttagttttttgtgaaattgagaagaattagaatttagtattgttaagtgtaagttagttttttgaaaattattataataaaaataatagatgtgtaaatttatgtatattgtaatttgataattttaaaaatttattaggttgagtgtagtggtttatatttgtaattttagtattttgggaggtttagatgggaggattatttgagtttaggagtttgagattagtttaagtaatatagtgagattttatttttattaaaaaaaaaaaaaaaaaaaaaaaagttaggtatgttggtatgtatttatagtgttaattatttaggaggttgaggtgggagaattatttgagtttaggagatgaatgttgtagtgagttatgattgtgttattgtattttagtttagaagatagaatgagattttgttttaaaaataaaaaataaataaaagaaaaagaaaaaaaaattgttatgatgtttttttttttgaaatttttgttgaaagggatgtttgatatttttaattaagatattatttttatatatagttgtatatttggtttagtataatattttgtgtatttatataagtagttaatatatatatgtaaaaaattgggttatttgtaaatgggaataaaaaaataatagtttgatttagggtttaaaaaataaggaaggtaatgtttaagtttttaatgagttgaaaaataataaatattaatttgaatagaaattttaaaagttgataatttattttattagttttttaaattttgtatgtatatataaatatatataattgaattgaattaaattgtggtttatttaaatgttgggttttttagttgtgatgagagaagaattttttatttttttgagttttgtgatatgtagttgttgaggttattgttagttagagtagttaatagggagatttttttttttataaattaattagttttatttttagtttttattttttgattaattttttttttattgtgaagtaaattaataagtattgagattgtagttaatttgtgagggttatttattttttgtgggttatttatgatgttattttttttaggaaatattttgtgatgttttatttattgtgattattttttttttagggataatttagggaatattttgtttatttagtttttttttaaaaaaaaatgtttgttttattttaatatggagtatattattgttatttatttgttttttagaattttattttaatgattgtaaagtttttaaaagtataaaatattttttttttaatgtagaattatattttgtgttttatagataattagtatttagtgtgtgttttttgtttttaatagagagaaaaataagaatattagtttttttaatttatttttttgtttgtagttttttatagatattaatagaatttgtaattatgttatatgtttatagaaagtattaatagtatgttttgaaaaaaataattttttgaaaattataagggtaatatgtgttaattataggtaggaaatttagattttttttttaaaggtagattttaaaaggatttttaattttattatttaaagataatttttgttaaattttggagtatgtttttgtagtattattttaattttttttttataaatgaagaatttgaggattaaagagattaagtatttgataaaggttatatagttagtaaaagatagagtttagatttgaatttagttttgtttagttttagatttgttttatattttagaataaattgattaggtggttgatttttgttatttgattagtgaaggattttaggaaatgttattttaaaatatgttgttttggtatattgattatttttagttgaaggtatttaaagattagtaaatgtagggaggaggagagatatgtggaatagatgtggattaattttttgattgaatttaagttagatttttattagttaattttaagtttatttttagttaatttatatgagtttgagtaagaataagtaaatgttgtttaaggaaaaatttgggttggtttgttatttagaatttttgaggtaatagttaagagatataagggatgtgaagggtgaggaattatggaaaagtaaggttaaataatttgtaggtggtaaaattataaaggggtttttatagataaaaattattatgaggtttgttatgggggttgaagatgaggaagatagtaggattttaatttagatttttaggattatttataaattaaattgtatatatagttaaagaatatgggttgggtatgttggtttatgtttgtaattttagtattttgggaggttgaggtaggtagattatgaggttaggattttgagattagtttgattaatattgtgaaattttgtttttattaaaaatatgaaaattagttgagtgtggtg

SEQ ID NO: 278 - DNA, 7309 bp, Artificial Sequence
  chemically treated genomic DNA (Homo sapiens)
atgtgattaatggtgttaattgttttttggattgtttttatagtataggataagattatattagttttagtaggttttattgaagaaagtttatgtgttttgtagaaataagatttttagtttagtttaataggagattaattatatgtttattttatttttttttaaggtatgatagtatttggttgagatgtttgtgtgtattttttgtgtgaagttgagtatgtaatttttaaagaaattataaaggagttatttgtttttaaaggaaaaatatatgaattttatgggtataaggaagatattaaaatagggttggggagaagtttttttttttttattttatagtattttttatagaaataattgattgtttgaatatatggttattgaaatatatatatatatatatatatgtatatgaaaataagagttggaatatttgattttgttttttattttttattattttagataatataggatataatatggttttattgtatatatgtgttttttggtttaaaaatattgagagtagatttttgtggaaagaaatatgaaaatttgaggatttatgtgaatgtagttagaggtgaatgtagttagaggggtttttaatttgttggtagagttgggggagagttggggtaattttattgttatgaaattggttttagatggaggtaaggaaaggtgtttattttttgttggtgttagatatagagagattttgtagtattttgtattttaggtttagaattgtttagtgttgggtagtagttttattgagggtttggttagagtttatggggatgggtggattaggttgtttgttgtttggaaaaggttattttgaatataatgatttttatatggatggtggggtttgggggaaggtattgtggttagggtttggaggggaagagggaggaaagtaaagaggagtttttttatgaggtaatagaaatgatagtattttttttaggttgaatttttaaaatttagttttgttttggaagattgggattgtggtattttttgtagtgtttttagattgttttaaggtttttaaattaatgatttataattatgttgtttttttagagagtatttttttttttggttgatatgtggttagtttaggggtggaggagttttggtagttatgaatttagatgggatgttgattgagagttttgtggttatggtagatgggaggggtgagttttatttatttaaaggtatttgtattttattgatgagtgtggaattgtgtttttttgtttttgtagtgagatgattgattaggattgtaggttgagtaaatgggtgttttttggtttatagtgttttttagtattagttagtgggatagagttttgtgaattttttaaggagttattatttgtttgtttgaatgttggaaaggggttggtggtgttgattattggatttatttaattaatatttattaaatttgttgttattaatatttaatttttgtgttttaggggtttagattttagtaagggaaatagatgggtaaataattatattagagttagttaagtattgttaaagaagttgatatagggtgttgtggggatatatgggaggggaattagaggaggttttttggaggaggtgatatttaagttgaggtttgaaggatgtggaagagtttagtaatttttgaagattaaaaaaatggtgataaaaaagatatttttttaattttttagtgttatgatttaagagataaataagtaggtgaatgtataattatattgggttttattataagttagagtttgttttttttaggattttggtattataattttttttgaaattttgtttttggtattgatttttgggggaggtagtaatataggaatttagtgtttgttgtgaaattgatggatggtttttagttttgggtatgtttttatgtgttaaatttgtttaaatggtaggatttattttttttttagaagtatttatttgttttataggattttttatggaattttggagtttttgaggtgagagggattttggatattattgagttttattttttatttaataaatatagaagtggatgtttggataggtaaagtgatttgattaaggtaggtgtatagttattttgtaatattgggaataaattttaggttttttgattttttgtttttattttattttttttttattttttagaaataaagtttttatgtgtttttttttatagtgatatgtttggaatgtattagttagtaatttaggaagggaaaaaaataaatatataagagataaatttgttaggaggataaatttgtattgtttttgattggtttagagggtgattattattatggtagagaattatttaattagtgtaagtaaaatttttttgtgggttgggtattgtataaagatttaaatgaatttgtttatagatttgaaaagtagatatgagatttgtgaatggttggggtttttaagtttatagtataagtatgggttatattttatagtttggaggattgagttttgaaaatgggtaagtttttttatttttttgaattttattttttttatatttaaaataaggatgagtagtttttgaggttttttttatgatttttttttttatagattttagtattttataatttgatataaagagggtggatatgaatttattttttttagaaaagttttaggaaagagaatattaggttattttagtaggtgtgtagataggttagatagattttgaaatttatttagttttttttagatgtataattttattattgtttttagttgttaagagaaagtaggagagtttgtatttttattttttttttttttttttttttttttggagatggagttttattttattatttaggttagagtgtagtggtatgattttagtttattgtaagttttgttttttaggtttatgttatttttttgttttagttttttaagtaattgggattataggtgtttattattatatttggttaattttttgtgttgttagtatagatggggttttattatgttagttaggatggttttgattttttgattttgtgatttgtttattttggttttttaaagtgttgggattataggtgtgagttattgtatttagtttgtatttttatttttattgttagttttaggtttattttatttagtttattaagtgatgttgaataattaatttttatatattattaggtttatggatattatgatatttagattgatgggtgtttgttgaagggggtgattttagtaggaggatttttttatgtaaggatttatggagtttgttgttttttttttttagggtgagaattaaattgtttttatatggtgggtagaggggaattgatttaggtttggaataagagagaatattttaattgaaaagtttttggaatttgttgaattttaagatattgtgtggattagtttaggatagggagtgagaagaaattaattaaaaggtaattttgttattttttagttggaaaaaagattagattatatttgtgtttttataattaagtagttgttggaaaaaaatgttttagatgttttttatgagaaaattgttgtttgaagtttagtagaagttatttatttgatatttatattttaggtaaggttttttgttggagaaaatattggtattttggataaaattgaaatgtgaaaagaaagggaagagagggtttttattatgtaagatgtttatttaaagtggatttggtttggaaagttttttaaaattttttatatgattgtggaataagttatgtggggtgtggggataagtgaattttttaaattttattatgtatgtttttatttaatttggatttttagagtggtttttagggtattttgtttaggatttagttagttgttggttatatttatgttttttagttttttgagattttatttggttttgagagggttaaaaagtagtgtggttaaatattttaggttttaaagtatttttattgtggttggggaagtaatagaattatattttataaaataatgaaaatagtgttagaaaaatattgagagatagaaatatttttatgagttaggttatagttagagtgaaggtagggaaggtttttaaagttgggtggaggggataagttaaaaagatgtggaaattggttttttttttttatggttaaagtgtttaaaggggaaaaaggagttttaaaaatgtttttggaaatattattttttatgaattttttggtttttgttgttttaatgttatttgtttgagatgtaaatagaggagttttgagaaagaagttgaatttgtatttttttttgtttttatttgttttaaatttgtggtatttttaataggatgaagtggaagagaaagggaaagagataaaagtgtagaaagatggaagattttagttgtaaatggttatttgtagttagatggaatagttgttgatgtttagggaaatgtatgtttttttttagatgggaaggagtagtggaaaggggtgatgagtttttggttggttattaattattttatttttttgtgttggttttttatttggaaagtgggagtgatatttgtgtttgttttttttatttataaagattattgtgagagttataatatggtgagatatagaattttgtttttaaaaatataaagtagaattaagatgttaataataaggatagtaattgtgttagttatttgtaattatttattatagttagttgtttaggattttggattgtttttttggttttattatagttttggattagtttatttttaaattttttgttgaagggtggagttttgttagttatgggtagggaattatttttttttgtttttttattttttgttttttaaatatgtttagggtttttgtatttgttgttttttttgtttggtattttttttttgtggtttgttttagagttgatttttgtttttgtttattttttagtgaggatggtattttagggagttttttttttattattgtagagagagtaggttttttttagttatgtttaatttagaattttgttttgttttttttatagttttagtattatagaaaattattttgtgtatttatggatgtttatgggggtaagggttttgtgttgtttaatttagtattttgaattgtgtttgttgaatgaatatagaattttgtttgttttgggagagtatagaaaatagttttttattatatattatagttagttgtaaatagtagatggttttttatattttagagagtaagaattagagagagagagaaagagagagagtttgggttttttttttttgtgtttgttttttttagagaaattggaggggtagtagttagtatttttttgttggttttattaagtatagttaaggtttttaggatatggttattttttatttgtggaagtggttttgttggggtgggtgggtgttagttggttttggtttgggttagagatatttagtggtttaggtgggtgtggggttagggtgtagatgagaaggggtatgagggttttgttttgaggatttagtggtaagtattggttttgggtgtgttttagtttatttatttgtgtgtttatggtggtattattttttataaggatttgaatgatttgggggtggttttgttttgttattttttgtttttggttttgttttttttttggagggttgatgaggtaatgtggttttgttattggtttgagggggtgggttttaatagtttgaggtggggtttttgggggtttagtgttatattatttggttgtttaggtagtggtgtagagtgggtagtaggtaggtggtgggtgtttagatggtttttttttttttttttgtttttttagtttttgtttttttgttgggaggttgtttgttgagttttgtgttagtgttgaggtagttttgttgtgttttattttgttttgttgggtatttggagggtagtgtgttggaggttaaggttgttttgtatggtttggtgggtgagtgagtttgggttgtagtagttttgttggtggtgtgtatggtaattttggagaggtgagtagtagttttggtagtggtggtagtagtggtaatgattttttggtttgggtttattgtgtttttgggtagttggagtttgggggattggggtgttgaggtgtgtatatgtttgtttagttatttttaggatgttttttgtaattttgatattggtaagtgtttttggtgttttgtttgagttttatgttgtagttaggattgtagtgttgtttagggaggtagggtgagttttattttttttttttgttttaggagaggggtagatggggttggggtggagtggagaaatttgatgtttttgggtgggggtgttggtatagttgagaggggaagatgttttgtagaggaaatttatagtggttgagggagtttttggttgtttttgtttttttaatttaggttgtgaggtttttattggtttttttgatatttggaaaatgtttttatttattattaatggaggaagggttagaagagaagggtggggaaagggtttttaaaatttggaatgttaattaaagtgttgggaaattgaatagttaaaaaaaaaaaaaaaagttgtttgttatgtgtatggaaagttgtaggagaaatttggagtattttgagtttgtattattttttgtgtttatgaaatttattttttttattgagatttaatttagttgtaggttttttaggtaagtgttaattgagtttttgggattgttaagtttgggtggatttaagggggaaaatgaggagaaagttgtggtattgatttatgttttggaggtattgtgtttgagagtgttgatagttagtagaaggtgtgaggggttatttattatatagttgtgaaaatttataggaaggttattttttttttttttgaatgtgtgtggggagggggagaatgggtagtggaaaatagatttgttattaaaagaataaatttgttaagggttatattatggtgatagttttagattggatttagtgttttgagtagagagattttgtaaagagattttttattttttagtgtgtatggagggttttgagagtattttgggaggtttgtttgggagtgtttgggatatttgtgtttggatggttaaaggtggagtggtatttgggaaatatttttttttttttttttagtttataaag

SEQ ID NO: 279 - DNA, 7309 bp, Artificial Sequence
  chemically treated genomic DNA (Homo sapiens)
ttttatgggttggaaaggaggagagagatgttttttagatgttattttatttttagttatttaaatataagtgttttaaatatttttagataagttttttaggatgtttttggggttttttatatatattaaggagtaggaggtttttttatagggtttttttatttaagatattaagtttagtttggaattgttattgtgatgtgatttttggtaggtttgtttttttggtgataaatttgttttttattatttattttttttttttttatatatatttaagggggaaaaaaatagtttttttgtgaatttttatagttatgtggtgagtgattttttgtattttttgttggttattaatatttttaaatatagtgtttttagggtgtgggttaatgttatagttttttttttatttttttttttaaatttatttaaatttggtagttttagaagtttggttagtgtttgtttgggaagtttgtagttgggttgggttttagtgaaaagaatgaattttataggtgtaggagatgatgtagatttggagtattttaagttttttttgtaattttttgtgtatatggtgggtaatttttttttttttttttaattatttaattttttagtattttagttagtattttaagttttgggaattttttttttattttttttttttagttttttttttgttagtagtgaatggggatattttttagatgttaaaaggattggtaggaattttatgatttaagttaggaaagtaaaggtggttaggggtttttttagttattgtgagttttttttgtagggtattttttttttttagttatgttagtgtttttgtttaaggatattgagtttttttattttgttttaattttgtttgttttttttttggggtagaggaaaggagtggggtttgttttgtttttttaagtagtgttgtagttttggttgtagtgtggggtttgggtggggtattaggagtgtttattgatgttggagttgtagaaggtgttttgggggtggttgggtgagtatgtgtatgttttggtgttttagttttttaggttttagttgtttaggagtatgatgagtttgagttaaggggttattgttgttgttgttgttgttgttggggttgttgtttgtttttttaaagttgttgtgtgtgttgttggtggggttgttgtagtttgagtttgtttgtttgttgggttgtgtggggtaattttggtttttggtgtgttgttttttgagtgtttggtgggatgggatggggtgtagtgaggttgttttggtgttggtgtaggatttggtgggtggttttttggtgaaggagtaggagttggaggagtaagaggaggaggagaagttgtttgagtgtttgttgtttgtttgttgtttgttttgtgttgttgtttgggtggttgagtgatatagtgttgggtttttggggattttgttttgggttgttggggtttgtttttttagattaatggtagagttgtattattttattggttttttaaaaagggggtggggttgggggtaaggggtaatggggtggggttgtttttggattgtttagatttttatagggaataatgttgttgtgggtatgtgagtgggtgggttggggtgtgtttgggattggtgtttgttgttgggtttttggagtggagtttttgtgtttttttttgtttgtgttttggttttatgtttatttgggttattgggtgtttttgatttaaattagaattaattaatatttatttattttagtaggattgtttttataggtgaggggtggttatgttttagagattttgattgtgtttggtggaattagtgggggaatgttaattgttatttttttagtttttttggagagagtaggtatagaggagaaagatttaaattttttttttttttttttttttttggtttttattttttgggatatgggaagttatttgttgtttgtagttggttatgatatatgatagaagattgttttttgtgtttttttagagtaaatggggttttgtatttatttaataaatatggtttaggatgttgggttaagtaatataaagtttttgtttttgtggatatttatgaatgtatagggtgattttttgtgatgttagggttatgaagaaaataaaatagagttttgggttggatatgattggggagggtttgttttttttgtgatagtaagggaagggttttttgaagtgttatttttgttgagaagtggataaagataaggattagttttggggtaagttataggagagaggtattaggtagggggaatagtaagtgtaaagattttgggtatgtttgaaagatagaaagtagaaaggtaagaggaagtggttttttgtttatggttgatagagttttattttttagtaagggatttgggggtgagttgatttaaaattgtagtaaaattaggagaatgatttaggattttagatgattagttataatagatgattgtagataattaatataattattatttttattattgatattttgattttgttttgtatttttaaaagtaggattttgtattttattgtattatagtttttataataatttttgtgggtaggaaaagtaagtataagtattatttttattttttagatgaggaattggtatagaaagatgggatgattggtggttagttaggaatttgttatttttttttattgtttttttttatttgaagagagatatgtatttttttgaatgttagtagttgttttatttaattgtaaatggttatttgtagttgggattttttatttttttatatttttgttttttttttttttttttttgttttattttgttagaaatgttataagtttggaataaatagaaatagggagaaatgtaagtttagttttttttttagaatttttttgtttatattttagataagtgatattgggatagtagaggttgaagaatttgtgagagatggtatttttaagaatatttttgaaattttttttttttttttgagtattttagttataggaaagggaaattagtttttatatttttttgatttgttttttttatttagttttaaaaattttttttgtttttattttaattgtggtttaatttgtagagatgtttttgttttttgatgtttttttagtattgtttttattgttttatggggtatgattttattgtttttttaattatagtaggaatattttgaggtttgggatatttagttatattgttttttagtttttttagaattaaatagggttttaggagattggagagtatgggtgtggttaatagttgattgagttttgagtagagtgttttggaggttattttaaggatttaggttgaatgagggtatatgtggtggaatttgagagatttgtttatttttgtgttttatatgatttattttatagttatgtggaaggttttagaagattttttagattaaatttattttggataagtattttatatgatagaggtttttttttttttttttttttatattttagttttgtttaaagtgttgatattttttttaatggaaggttttgtttggaatataagtattaagtagataatttttgttgaattttaagtagtagtttttttatagaaagtatttgaagtgtttttttttagtagttatttaattatgaaagtataagtataatttgattttttttttagttgaaaagtaatgaaattattttttggttaatttttttttattttttattttaagttggtttatatagtgttttgaagtttagtgaattttaagagttttttagttgggatgtttttttttattttaaatttgagttagtttttttttgtttattgtgtgaaggtagtttggtttttattttaaggaaaagaaatagtaaattttatgaatttttgtgtaggggagtttttttgttagggttattttttttagtaggtatttattagtttggatgttatggtgtttatgagtttaataatatgtaagaattggttatttaatattatttaataagttaggtggggtgaatttgaggttaatagtaagaatgaagatgtaggttgggtgtggtggtttatgtttgtaattttagtattttgagaggttaaggtgggtggattatgaggttaggagattgagattattttggttaatatggtgaaattttgtttgtattaataatataaaaaattagttaggtgtggtggtgggtgtttgtagttttagttatttgggaggttgaggtaggagaatggtgtgaatttgggaggtggagtttgtagtgagttgagattatgttattgtattttagtttaggtgatggagtgagattttgtttttaaaaaaaaaaaaaaaaaaaaaaagaatgaagatgtaggtttttttgtttttttttgatagttaagaataatgatagagttatatatttgggaagaattgagtaagttttaagatttatttggtttgtttatatatttattaggatgatttggtatttttttttttggaatttttttaggaaaggtgagtttatatttattttttttgtattaagttataggatgttagagtttgtaggaagagaagttgtaaaaaggattttagaaattatttatttttgttttaaatgtgggaaaaataaggtttagagaagtgaaggaatttgtttatttttagggtttagttttttaagttgtaaggtgtggtttatgtttgtattgtgggtttggaaattttagttatttatagattttgtatttgttttttagatttgtagatagatttgtttgagtttttgtatagtgtttagtttatagagaaattttatttatattgattaaataattttttattatgataataattattttttgagttaattagaagtaatataggtttgtttttttgataggtttattttttgtgtgtttatttttttttttttttaaattattagttaatgtattttaaatatattattataaaaaaaagtatatgaaaattttgtttttgggaaatgaaaagagagtaaagtggaaataaaaaattaaaagatttgagatttgtttttaatgttgtagaatagttgtgtatttgttttggttaagttattttgtttgtttaggtgtttatttttgtgtttattggatgaaagatagaatttagtggtatttaggattttttttgttttaaaaattttaagattttatggggaattttgtaggataagtgaatgtttttgaaggggagatgggttttgttatttaaataggtttgatatatgggaatgtatttaagattgaagattatttattagttttgtaatgaatattgagtttttatattgttattttttttaagaattaatgttgaaaatagaattttagagaagattgtgatgttaaagttttaggagagataggttttggtttatggtggagtttagtgtagttatgtgtttatttgtttgtttgttttttggattgtagtattaaaaagttaggaaggtgttttttttattattatttttttggtttttaggagttattgaatttttttatattttttagattttagtttagatgttattttttttgggaaattttttttgattttttttttatgtatttttataatattttgtattaatttttttgataatatttagttgattttaatgtgattatttatttatttgttttttttgttggagtttaagtttttagaatatagggattaagtgttggtaataatgagtttaataagtattggttgaatgggtttaatgattagtattattgatttttttttagtatttagataggtaggtggtggttttttggagagtttatggagttttattttgttggttggtgttagggggtgttataagttagagaatatttatttgtttagtttgtagttttggttggttgttttattgtgagggtgggagagtataattttatatttattggtggggtgtgggtgtttttgagtgggtgaagtttattttttttatttgttatggttataaagtttttagttaatattttgtttgggtttgtggttgttggagtttttttatttttgagttggttatatgttaattaaagggggagatgttttttggggaagtaatatagttgtgaattattggtttgggggttttagggtggtttgggaatattgtagaggatgttatagttttagttttttagggtagagttgggttttggaaatttaatttggagaaggtattgttatttttgttgttttatagggaagtttttttttgtttttttttttttttttttttagattttagttatgatgtttttttttaagttttattgtttatgtgaaagttattatatttaaaatggttttttttaagtaatagatagtttggtttatttatttttatgagttttggttagatttttagtggggttgttgtttagtattgggtaattttgagtttaagatgtgaggtattgtaggatttttttgtgtttggtattagtagggggtaaatatttttttttgtttttatttggagttaattttatggtagtaaaattgttttagtttttttttagttttgttagtaaattgaagatttttttggttatatttgtttttggttatatttgtatgaatttttaggtttttatatttttttttatagggatttatttttagtgtttttaagttagaaaatatatgtgtgtagtaaagttatgttgtattttgtgttatttagggtggtgggaaatggaaagtagagttaaatattttagtttttgtttttatgtgtatgtatgtgtgtgtatgtatgttttaatgattatatatttaagtagttaattatttttgtgaagggtattatgaaatggaaggagaagaatttttttttaattttgttttaatgttttttttatgtttgtggagtttatgtgttttttttttaaaaatgagtagtttttttgtggtttttttgaaggttgtatgtttagttttatatagagaatatatataagtattttagttaggtgttgttatgttttgggagggaatgggatggatatgtggttggttttttgttagattgggttggaggttttgtttttgtaaggtatatgagttttttttagtggaatttgttggaattgatatggttttgttttgtgttgtggggatagtttaaagagtagttaatattattgattgtat

SEQ ID NO: 280 - DNA, 2501 bp, Artificial Sequence
  chemically treated genomic DNA (Homo sapiens)
agttgggattataggtgtatgttattatgtttggttaatttttttattttttatagagataggattttgttatgttgtttaggttggttttaatttttgaatttaagtgatttatttgttttgggtttttaaaattttgggattataggtgtatagtgttaggtttttatatttttatatatttttttgtttttttagttgtgaaatggagataatgatatagttttaatttatgtgggatgtttagtatagtgtttggtatttgatagatttttttttttttatttgaaatttatttttgagttgggtatggtggtttatatttgtaattttagtatttgggaaaattaaggtaggtagattatttgaggtgaggagtttaagattagtttggtaaatatggtgaaattttgtttttattaaaagtataaaaattatttgggtgtggtggtatatatttgtaattttagttattttagaggttgaggtatgataattatttgaatttggtagatggaggttgtagttgagttgagattgagttattgtattttagtttgggtgataaagtgagattgtttaaaaaaaaattatttttaatttaatataaaattttttgaatttttttttttttgagttgtttttttatttgagtttattttatattattgaatagttaattatagaattgtgtattattttttttgatttttagatttttagttttttatagtattttgtttttttttgttgtattagttatagttgtattttttttttttttttttttgagatagagttttattttgttatttaggttgtagtgtagtagtataattttagtttattgtaatttttgttttttgggtttaagtaatttttttgttttagttttttaagtagttgggattatatgtgtgtattattatgttaggttaatttttgtatttttagtagagatgaggttttattatgttgttaggttggtttagaatttttgattttgtgattagtttattttagttttttaaagtattgggattataggtatgagttattgtatttggttatagttgttattttatttgtgtgattgattattgtatgatgtttttattgaagtgtagtgaaggtaggaaatatgattggtttttataatatttttaatatttattattataggtggtatatagtagggttttaataaatatttgtaaaatgaataaagttaatgagtgtttatgtttgtagttttaattgttttgaagtaaatatttgattttttaatttttattagagtgttttgtatatagtaggtttaattatttttttttttttattaattatttatgttttgtaagaatttagttagttgattttttgtattttataagtgtgatgattgggtgtttttgtgtgagatgtgttatttttgaattttgttatgatgttggtatattgtgtgtttgatatgaagaaaaaaaaaatttagttagtttattaggtatagtggttaaggtttgtaatttttgtattttgagaggttaaggtaggaggattatttgaatttaggagtttgagattagtttaggtaatatagtgagattttgttttaaataataaataaaaataattagttgggtatggtggtgtgtgtttatagtattaattatttgggaggttgaggtgagatgattgtttgagttagggaggttaaggttgtagtgagttaagtttgtgttattgtattttagtttgggtgatagagtgagattttgttttaaaaaaaaaaaaaatattaaattttagaggggtgaaaaaaaattttatagtggaaatatagtaatgagttggtttagttttgtttttgttataatggtttatggtgttggaggatttttttgtgtatgtgtatagtttttggttggttatttttgtgagtgtgttttattttttattgagtgtgtgtgaagattatggaggttgatttgggagtgtgtatgtagttttgttttgtgtttgatttgtggattttgtggtgtttggtttgggtggtttggattgtggagggaatgttttggagggtggagaattgggatgaggttgaggtaggtgtggaggaggtaggtgttgaagagtatggttttgaagaagatggtggggaggagttgggtgttgaggagtttggtttggaagagtttggtttggaggaattgggtgttgaggaggagatggaggttgggtggttgtggtttgtgttgtgtttggtgaatttgtgtgagtttttttaggttattttttgtaattgtagtttgtgtgttgtgttgtttgtatggtttaattttgatggtgagttgtagttttatttaatgttgttgtttggtatgggttgttgtatttatagttattgaggtatgggtttggtgtttaggtttgatttagtagggatgatagtatggtttgaagtttttttattgttttggggtttattttgtagatgg

SEQ ID NO: 281 - DNA, 2501 bp, Artificial Sequence
  chemically treated genomic DNA (Homo sapiens)
ttgtttgtaaaatggattttggggtggtagaggggttttagattgtgttattgtttttgttgggttgggtttaagtgttgggtttgtattttggtagttgtggatgtggtggtttgtgttaggtggtagtgttgggtagggttgtggtttgttgttgaagttgagttatatgggtagtatgatgtgtggattgtgattgtagaagatgatttgggagggtttgtgtgagtttattgagtgtagtatgggttgtggttgtttggtttttattttttttttggtgtttagtttttttgggttggatttttttgggttggattttttggtgtttgatttttttttgttgttttttttagggttgtattttttgatgtttgttttttttgtgtttattttggttttgttttagttttttgttttttggggtattttttttgtgatttagattatttgggttggatgttgtgggatttgtgggttggatgtggggtggagttgtgtgtgtgtttttgagttgatttttgtagtttttgtgtgtgtttggtagaggatggaatgtgtttgtggaaatagttggttggaggttgtgtgtgtgtgtagaaggattttttagtattgtaggttgttgtaatggaggtgaggttaggttaatttgttattgtatttttattataaaatttttttttgtttttttaaggtttggtgttttttttttttttgagatagggttttattttgttgtttgggttggagtgtagtggtgtgagtttggtttattgtagttttgatttttttggtttaagtgattgttttgttttagttttttgagtagttggtattgtaggtgtgtattattatgtttgattaattatttttatttgttgtttgaaatggagttttgttatgttgtttaggttggttttgaatttttgggtttaagtgatttttttgttttggttttttaaagtgtagggattataggttttagttattgtgtttggtggattaattgaattttttttttttttatgttagatgtgtaatgtgttgatgttgtaataaggtttgagggtggtgtattttatatgggaatatttaattattatgtttataaagtataaaaagttaattaattgaatttttataaggtatgggtgattagtaaagagggaaaaataattagatttattatgtgtagagtattttggtggaaattggaaaattagatatttattttagagtaattaaaattataaatataaatatttattaattttgtttattttataaatatttattaaggttttattatgtattatttatggtgataagtgttgaaaatattgtaaaaattggttatgttttttgtttttattgtattttaataaaagtgttatatggtaattaattatataaataaaatagtaattatggttgggtgtagtggtttatgtttgtaattttagtattttgggaggttgaagtgggttgattataaggttaggagttttagattagtttgataatatggtgaaattttgtttttattaaaaatataaaaattagtttggtgtggtggtgtgtgtatgtaattttagttatttaggaggttgaggtaggagaattgtttgaatttgggaggtggaggttgtagtgagttgagattgtgttattgtattgtagtttgggtgatagaatgagattttgttttaaaaaaaaaaaaaaaaaaagtgtaattgtgattagtatgataaaaagagatagggtattatagaaggttaaagatttgggggttaaggaagatggtatataattttgtgattaattgtttaatgatgtgggatggatttaagtggagaagtagtttagaaaaagaagggtttagagagttttatattaggttaaaaataatttttttttagatagttttgttttattatttaggttggagtgtagtggtttagttttagtttagttgtaatttttatttgttgagtttaagtgattattgtgttttagtttttggagtagttgggattataggtgtgtgttattatatttaggtaatttttgtatttttagtagagatggggttttattatgtttgttaggttggttttgaattttttattttaggtaatttgtttgttttggtttttttaagtgttgggattataggtgtgagttattgtgtttagtttaaaaataaattttaagtagaaagaaaaaaatttattaagtgttagatattgtgttaagtattttatgtgaattaaggttatgttattatttttattttatagttaaggaaatagaagggtatataagaatgtgaaggtttagtattatatgtttgtaattttgagattttgggagtttaaggtaggtggattatttgagtttaggagttggaattagtttgggtaatatagtgaggttttgtttttataaaaaatgaaagaattagttaggtatagtggtgtgtatttgtagttttagtt

SEQ ID NO: 282 - DNA, 2401 bp, Artificial Sequence
  chemically treated genomic DNA (Homo sapiens)
ttattaaagaaaaaaaagatgatttattagatagttgttaaggtatttatataaaattatatgatagtaggatagatggtaattaagagggaatttaggatttgttattattagttggaaatatttgatttttagtttgtaaatgtgataagttagattaatattagtaggatattgaatatagtttgtagggatgagtttttgtgttatttttggatatgtgtttaagtaattagaataatttaaaatgttattaggtttttgttgttatttttataaattttgaatagtgagttgggtttttaaggaatttgtttttgttagtttattttatgttgtataataaataggtttaaagtttttggtagtgtatattaagtatggaggattttttatttattatgatagtttttttgttggagggttggggttgtattttatttttttttttggaaggggtggtttttgtttgaggttttatttgttttatagtagagggatgaaatggtaggattttggttttgatgggttttatttggtaatggtatatgttaagtgggttatgttttattgtttagagtaagttatatggttatgtttgatattgatgtgtgggaaatgtagaatttttttgtatttggggaggtagatatttggataatatgtaatttattatagggttagttggatgaagaatggttaagggtttaggttttttattttgagttaggttgaattagttggggttgtgagattaagttatggttattagtgtttgtttggaattatgttttgtttttgttgtgtttatattgtagtagggtttttgttttttaatttatttgaaattggtggtgggtgtggtatatagatgagaaataggaattttttatgttgggttttaataggagttgtggtgggaatataaatggtgtagttattttggaagatagtttggtggttttttataaaattaaatgtattttttatatatgatttgttatatattatttagtaattgtattttttggtatttgtttagatgagttaaaaatttgtatttatataaaaatttgtatgtggatgttgatagtagttttatttataattgtttaaatttggaagtttttaggaggtgagtgggtaaataaattgtggtgtttttggttagtggaatattatttagtgttaaaaagaaatgagtttaagttatggaaagatatgaaagaattttaagtattattaagttaaagaagttaatttgaaaaggttgatgttgtatgagtttatatttatgatattatagaaaaggtaaaattataaagatagtaaaaggattagtggttgtaggagttagggaggagggagggatgaataggtggggtatagaggatttttagggtagtgaaattattttgtatgatattgtaatggtggatataggatagtaagtatttgttttttattttgtagaatgtatggtattgagaatggatttttttgtaatatatggatttttagttataatattgaattttttttggggttttgtattgtttgtagtgttttttaatttttgtttttgttttgtttattgttttttttttttgttatagtgtgtttgttttgtggttgttaattagttgtgtgttttggttgtgtgttttgttttgtttttggtgggtgtgtgtgtggttaatgggtggtgtgtgggggttgggttgtggtggggtggggtagtggggtggttgttaattgttgtggtgttgttgaaattgaaaatattatattatgttaattgtggttgggtttgtgtgtatgggggtggggtttgtgtgtataaagggggtgtaggtgggttgggtgttttataggttaagtgtgttgtgtttgaggggtgttggttaggtttgagtgagtgagttagttagtaggtattgagggggtgtggttgttgtttggatgagataggtgaatttgatgtagaagagtttattattggatagttaggtagttgttgtgttttttgtatatgtagagttgggtggtgtggggttttttttgtgtttggtttttgtttttttttttttttttttttttttttttttgttgttttttttttttttgttgtttgtgtttgtgtagttttgggttatgtttgatgtgtttttttgtagtatatttatgatggagtgttttgttgtttgtgggatttttttagtattagtgtgtattagtgtttgttgtagtttttttgggttggtggattatgaggagttgagttgtgagttgtaggtttgtttggttgagttgaatgttgaggattagaattgttgggattatgatttttagtaggatatgttgttgtggggttttggatgtttgtagtggattgaagtgg

SEQ ID NO: 283 - DNA, 2401 bp, Artificial Sequence
  chemically treated genomic DNA (Homo sapiens)
ttattttggtttattgtaggtgtttagggttttgtagtggtatgttttgttggaagttgtaattttagtggttttggtttttggtgtttagtttggttaggtgggtttgtagtttgtggtttagttttttgtggtttattggtttgaagaggttgtggtaggtgttggtgtgtattagtattgggaaggttttatgggtgataagatgttttattgtggatgtgttgtggagggatgtgttggatatggtttggggttgtgtaaatgtgggtagtgagagaggagaggatagtgagaagaaggggaaaggagaggaggagagggtggaggttgggtgtaagggagattttgtgttgtttgattttgtgtgtgtgagggatgtggtggttatttggttgtttggtggtggatttttttgtgttgggtttgtttgttttgtttggatggtagttgtgtttttttgatgtttgttggttagtttgtttgtttaggtttggttggtattttttgagtatagtgtatttggtttgtggaatgtttagtttgtttgtgttttttttatatgtgtgggttttatttttgtgtgtgtgggtttggttgtgattagtataatgtagtatttttagttttaataatattatggtgattggtggttgttttgttgttttgttttgttgtggtttggtttttgtgtattgtttattggttgtgtgtatatttattgggggtggggtggggtgtgtggttggggtgtgtggttgattggtggttgtggggtgagtgtgttgtagtaggggaagggggtggtgagtggggtgggggtgggagttaaagggtgttgtgggtggtatggaattttgaaagggatttaatattataattgaaagtttatatgttataggagggtttgtttttagtgttgtatattttatgggataaaggataaatgtttattgttttgtgtttattattatagtattatataaggtagttttattgttttaaaaattttttgtgttttatttatttattttttttttttttttagtttttgtaattattgatttttttattgtttttgtagttttgttttttttataatgttatagatgtgaatttatatagtattagtttttttagattggtttttttgatttaataatatttaaggtttttttatgtttttttatgatttgagtttatttttttttagtattgaataatattttgttgattggaggtattatagtttgtttatttatttattttttgaaggtttttaggtttgggtaattatgaataaagttgttattaatatttatgtgtaagtttttgtgtggatgtaagtttttgatttatttgggtaaatattaaggggtataattgttggatggtgtgtggtggattatatgtgaagggtatatttagttttgtaaggagttattaaattattttttaaagtggttgtattatttgtgtttttattgtagtttttgttaaagtttagtgtggagagtttttgttttttatttgtgtattatatttattattaattttagatgaattaaaaaatagaaattttattataatgtggatatggtaaggataaggtataattttaaatgaatattgatgattgtggtttgattttatggttttggttggtttggtttggtttggggtgaagagtttgggtttttggttgttttttatttagttggttttgtaatgaattgtatgttgtttaaatatttgtttttttaaatgtaggaagattttgtattttttgtatgttaatattagatgtggttatgtaatttgttttgggtagtgaaatgtgatttatttggtatgtattattgttaaatggagtttgttaaagttagggttttgttgttttatttttttgttgtgagataaatgagattttagataggggttgttttttttaaaagagaaaatggagtataattttagttttttagtgaagggattgttgtggtgagtgagagattttttatgtttgatgtatgttgttaagagttttgggtttgtttgttatgtagtataaggtaagttgatagagataggttttttgaagatttaatttattgtttgaggtttatgggaatgatagtaagggtttggtggtattttgagttgttttggttatttggatatatgtttagaaatgatgtagagatttatttttgtaagttgtgtttagtgttttgttggtgttggtttagtttgttatatttgtaggttggaggttaggtgtttttagttggtagtgatgggttttgagtttttttttggttattatttattttgttattgtgtagttttatgtgagtgttttaataattgtttagtaagttattttttttttttttgatga

SEQ ID NO: 284 - DNA, 1508 bp, Artificial Sequence
  chemically treated genomic DNA (Homo sapiens)
attttataattataaatatttagtgtattttgtaaatatggtataatttgttggtataaaattttattgttttagaaaatattggtaataaaattatagaaaagttaaagatttttattttttattttgaagtgtttgggagatattttagaaatggatgggaaatgttaaattttgtatgtttgtttatttttttttttatattgattagatgtaaatgagtgttattaaaagtatattataggtatttatatagattttttttataagggatttataaagtttagatgtgaaatgtattttaaagggtttttagttgttttttatttttttttttgtgaaatagggaagatatatgtgtttttaagggtagagatggaatttgggttaatgggttggggggtggggggaagttggaagggattgttttaggatatggtaggatagtggattgtttttgttgttttgttgtttatattggggttttttgtaggtgtgttggttttttttttttttgttgagaagaagttttgttaaaatatttgttttttttgggaatttttttgtgggtttaaagtgggaaaatgttgttttaggtttaaaataatttgtttaagttttttagtgtgggagaaatgtttttatttgttttttgtttttgggggtgttttttgttttttgttgttagaattttggggagtgtttagatttggggtagtatatgtttgggttaattgtgagtagaataaatttttggtgggtggttaggaagtttttttttagttattgtttttttttagtgtttttttttttttttatataatataagattttttttttttagtttttttaaagtatagtttaaggaaatttttttatagtttttatttagttatgggttagtatgtttgggggtaaatatgtagatttggaggtaggtatttgtgggggggtgttggtttgggtgtgtggggaagtgtttgtttttgttatttgtttttttaaatattttgattgttgatttggttttttagttttttttttattttggagtatttttttggtgttggtattgttgaagaatgggtttgggtggggaggtgaagagaagttaggaatgttttatgtttttttaatggagagggggttttgggagtttttgagttaggaggatatggaaaaggggattggggttttgagattgggtttgttgggtttaagatgtgttttttggatgggtttaggatgtttttttgttgtgggaattttgtggtttggttttgtttgttgggggtttgaaaaagtggattgtagggtggaaggtgttatttatttgagttttggggatagtttttgggattttttgttaagtgtttaaaatggtaggtttttaagtggtgtgtggtgtttttgtattttttaaaatttttgaaatattttaaaaatttttttgtattttggtgtttggtagggttttttaaaaaaagtaaattttttttttaaatgta

SEQ ID NO: 285 - DNA, 1508 bp, Artificial Sequence
  chemically treated genomic DNA (Homo sapiens)
tgtatttgggagggaggtttattttttttggaaaattttgttagatgttaagatgtagaaggatttttgagatgttttaagaattttggaaagtgtaaaaatattgtgtgttgtttggggatttgttgttttgggtgtttggtggagagttttggggattgtttttaggatttgggtaaataatattttttattttgtaatttatttttttgaatttttagtaggtagggttggattgtggggtttttgtgataggggagtattttagatttatttagaaaatgtgttttgggtttaatagatttaattttaggattttaatttttttttttgtgtttttttagtttaggggtttttgaggttttttttttattaggaaaatataaaatatttttggtttttttttatttttttgtttaggtttattttttagtggtgttaatgttagaggagtgttttgaagtggaaagagggttggggggttagattagtagttgggatatttggagaggtagatagtagaagtggatatttttttgtatgtttgagttggtgtttttttatggatgtttatttttgagtttatgtatttgtttttagatatgttggtttgtggttggatgaaaattgtgaggaggtttttttgggttgtgttttaagggaattgaggaaggaagattttgtattgtatggggggaaaaaaaggtattggaggggggtggtggttgggagggagttttttggttgtttattaaaggtttgttttgtttgtggttggtttggatgtgtgttgttttgggtttaggtattttttaaggttttggtagtagagggtggggagtatttttgggggtagagagtgagtaagaatgttttttttgtgttggggggtttggatagattattttaaatttgaggtaatatttttttgttttgaatttatgggggggtttttgggggaggtggatgttttggtagggtttttttttagtagggggggagggagttgatgtgtttgtagagagttttggtatgggtaataaggtggtagaaataatttattattttgttatgttttaaggtagttttttttaatttttttttattttttggtttattggtttaagttttatttttgtttttgaaaatatatgtgttttttttgttttatagagggagggatgagagatggttaggaattttttagggtatattttatatttaaattttgtggattttttatggaaggaatttgtgtgggtgtttgtggtgtatttttggtgatatttgtttatatttagttggtgtggaaagaaaaataagtaggtatgtagaatttaatattttttatttgtttttgaaatgttttttaaatgttttgaaataagaaatgaagatttttaatttttttataattttattattgatattttttggaataatggaattttatgttaataggttatgttatatttgtaaaatatattaaatgtttataattgtagaat

SEQ ID NO: 286 - DNA, 1984 bp, Artificial Sequence
  chemically treated genomic DNA (Homo sapiens)
  unsure (9, 17..18, 33, 41, 49..50, 52, 54, 62, 80, 84, 127, 157, 159): unknown base
  unsure (175, 207..208, 214, 1181): unknown base
agttttagntattattnntatttttattaatgnttttgggnttataggnngngnttttttgnttaaatagtagttaatgnaggnattttaaaaggtatattattttatatttatttagtggttatgntattatttaatttttattataattttgtgngnttagtataatttgtgnttttattttatttgtgaataaatggaggtagnnntttgngtaatttataagtaagtggtagatttgggggttgtgtttagataatgtggttttagattttttgtttttttttgttttttgttgtattttgattgagtttagttatttatttttttaatatatattaattgttgtttttatgttttaggttttgtgttagatgttagaaatatatttttatttattggattttggtatggtttattgtttagtgttttgttatgttatgtgttatataatgtatttattttggtatttagtttatggaaaataatgttgaaagatattgtatgtatgtttttataataaaattatgtaatttatgttttttttattgttttggttattaggaagtttttatttaaattagagtaaatatattagaatttgggtttgttattttagtttgttgaatttttttttttggtttagattttttattttggtttataaattttattgtataaatgttttttattgtaaaatattttaaattttttttaagggaaggttgtatggaaatgatatagtaaggttttttttgtatttttttagatttttattagggaaggtagatttagatgttttttttatttttagttttaaagttttttatttataaaattttttaagtagtgattattgttgttttgagtatttggaggtagtttagagtttttgaaaggtaaaatttatatataaaaagaagttttttttgatttagattttagttttggtgttagatgtatatttgaggagtaggtggttagttagatttttatttgagtagttaataaaatttattgttttttaatggaattttttttgtaagtttgaattgatttgttatttttgtgatttgtgagatggtagggaagtattaaatattattatgatttgggttatagtggtgggaaaaaaggaaaaaagaaaaaaaaaatttattgttaagttttgttaggtgtanaaagggttggaattgttggggttattttatttgatttattggaaatagagtggattttattaatattttaataaagagaatttttttgtattaggttggaagtggttgttagttttttgtgtaattttattttttggaaaagtggaattagttggtattgtttagtgtgatttgtgaggttgagttttaatagtttaaagaagtaaatgggatgttatttttgtggggtttgttttttgtgaggtgtttattttgtatttgttatgtaaaatgagggagtgttaggaaggaatttgttttgtaaagttattggttttggttattagtttttatttaatgtttttgtgatgttgttgttgatttatttgggaagttggttggttggtgaggtagagtttttttttaaagtttggtttttatggaaaatatgtttagtgtagttgtgtgtatgaatgaaaatgttgttgggtgtttttagttggataaaatgtagttgagaattttgtttgttttgtgtgtttttttgttttaggtagggaagaggggttgttgggtgtgttttgtgttttgtttttgtatttggattgtttggtatgggtagggtgagggggtttttggggggttggggtttttggttgtggtggtgaagatagattggggtttggtagggaggttattttgagtttagagattttaggtattttttatatataggtttttattttggtgtgtgtgtgtgtgtgtgtgtgtgtgtgtgtgtgtgtgtgtgtgtgtgtgtgtgtgtatgtttgttaatgggagga

SEQ ID NO: 287 - DNA, 1984 bp, Artificial Sequence
  chemically treated genomic DNA (Homo sapiens)
  unsure (804, 1771, 1776..1777, 1810, 1826, 1828, 1858, 1901, 1905): unknown base
  unsure (1923, 1931, 1933, 1935..1936, 1944, 1952, 1967..1968, 1976): unknown base
tttttttgttaatgaatgtatatatatatatatatatatatatatatatatatatatatatatatatgtatgtatgttagagtgggagtttgtgtgtggggggtgtttaggatttttgggtttggaatgatttttttattgagttttgatttgtttttgttgttgtgattggaggttttgattttttgaaagtttttttattttgtttgtgttgggtgatttgaatgtagaaatggggtgtagagtgtgtttggtagttttttttttttatttgggataggagaatgtatagaatgagtggagtttttggttgtattttgtttgattagaagtgtttggtggtgtttttatttatgtatgtggttgtattgagtatattttttgtgggagttaggttttgaggagaggttttgttttgttagttagttaattttttaaatagattagtagtagtattatgaaagtattgggtagaggttgatgattaggattaatggttttataagatggatttttttttaatgtttttttgttttgtatggtagatatggggtgagtattttgtgaggagtgagttttgtggaggtggtattttatttgtttttttggattgttggggtttagttttataaattatgttgggtaatgttagttgattttatttttttagagaatggaattgtatgggggattggtggttatttttagtttagtgtaaaaagattttttttattaaaatgttaataagatttattttatttttaataaattagataaaatggttttagtagttttagttttttntatgtttggtaaggtttggtagtggattttttttttttttttttttttttttttattattgtggtttaagttatgatggtgtttggtgtttttttgttattttataaattataaagatgatagattaatttgagtttgtagaaaaaattttattaaggggtaatagattttattaattgtttaggtgagagtttgattagttatttattttttaaatgtgtatttggtattaaagttgggatttggattggaaggaatttttttttgtatatggattttattttttagaagttttgaattatttttaggtatttagaatagtagtagttattgtttaagggattttataaatggggggttttgggattgagggtaagagggatatttaggtttgttttttttaataggaatttaagaaaatgtagggaagattttattgtattatttttatgtagtttttttttagaaagaatttaaggtgttttataataaaggatatttgtgtaatagaatttatgaattaaaatagaaaatttgggttagaaggaaaagtttagtaaattgaaatgataagtttaaattttaatgtatttgttttgatttggataagagttttttgatagttaaagtaataaaagaaatataagttatatagttttgttgtagaaatatgtatataatgttttttagtattattttttatgggttaaatattggaataaatgtattatgtaatatgtaatatagtaggatattgagtaatggattatgttaagatttagtggatggggatgtatttttagtatttggtatagggtttggaatatggagatagtaattagtgtgtgttaaagaaatagatggttagatttaattaagatgtagtagaaggtagggaggggtaaggagtttggagttatattgtttaggtatagtttttggatttgttatttatttgtaaattatntaaannnttgtttttatttgtttatagataaaatgaaantataaattgtattgantntataaggttgtggtgaggattaagtgatgntataattattgaataaatataaagtgatgtgttttttaagatntttntattggttgttgtttggntagaaggntntnntttgtggntttaaggntattgataaagatgnnagtgatgnttgaagtt

SEQ ID NO: 288 - DNA, 17897 bp, Artificial Sequence
  chemically treated genomic DNA (Homo sapiens)
atattgtataattttttatttatgtttaaagtaaaggatttattatatattttgaatatagtttattttttatttttatttggaattgttttttttttatggttttttttttttttaatttttattgtttataatatgatattataggttaggtatgtttgtagataattgggataatttatttttatttaagtaaaaattttagatggtagtttttttatttgggattatgaagtaggtaggattttttttttttttttaatagagtttaagtagtaagattgaataagatgggatgaatttaaagagaaatatttgtatttgtttagttttttaattaatatttattgaatttttttatggttaggtgtgtaagatgttaggagggatgagataagatgatgatgatgatgatgatgatgatgatgatggtgatgatgatagtgaggatgagggtgaatattttaatgagagttttttatatgttagggattgttttaggtattttatatatattaatatatatatttattataatgattttgtattgttatgtgtattttatatatgaggaggtagaggaaggaaatgaaataatttgtttaagagtatagagtttgtaagtggtaaagataagatagaaataattttttaagagtagagagtggtgatttttggggatagggaagtggaaaagtggggagataaaggttgttgttttttttaataagttttgaagatttatttgattaggtttaagaaaaatttgataattattataaagtaaaaggaagaggagatgaggtgggtttttgggtatagatgtttgttttggaaagtttagggaggaaggggtgagaggaattgggttgtagtataggaatgggggatttgggaattagaggggattggttagggtgggttattgattgtagtgaatgtttatttgttgattgggttgtagtataggagtggggggtttggaattaagaggggattggtttagggtgggttattgattgtagtgaatatttatttgttgattagtttgatttagaagaaagggagagatggatgttggaggagagagggggttttgagggagtttaggattggaggtgggaagatatttttatggatatttttttattttgatagatagaaaagatgatggtttgtagtagtagatttataaattgtgattgaaaggtttgatggttttttttatttgttttttttatgtatagagaggtggagtaatttgttttaggtattatagtttataagtggtgaagttggagttgggggttatagattattgggtttttttttatgaatttttgttgtattttggttttttttaattttgagtatttatgagttttaagaaagatagttgggaataggtgatttttatggttatttttggaatatttggttagaatattttagtataaaatttaagttgttgttaagtagaaatttttagtggatattagtttagaaaatttaattttattttgtgatggatttgtagtgtgtgtgtatttattaagtaaatttgattttattgttgattagtgagaaagaggaataatgtaaatagttagtgtaattgtatttatatttagttttgtgagtttttgttattttagttggttgtggtgggggatgtggaggtgtatgtagtttttaggttttagtgaggggtttttgtatagggtgggtgttttttatgttttatgtgtatttaggtttgtattaaagatagttttttttttgtagtgtgatatttagttaagaaaattattttatttggtgtttagtggaagaaaatattttttttaatagggaaggaaaattggttgtgttgggttgagggaggggagtgtggaatttaaatggtgttttttttaggttttttttaaggtgatgtggattttgattttagaatgttattatttggaaaattgtgttttattgtttaaatttttgttttttttttttgtttttttttttttattttatttttttttttttgttttttgatttatttaatgttaatggttttttagaaggttaggttttttatataagtttagttttttgttaggtaatttttttggggttttaagttgtaaatttgggttgttttttgtattttgttttgaggatttttttaaagagataggtaagggttttttttggtaaaatgtttttttaattttatgtattagttttatttgttattgaagaagtgggttgttttttttgtgtttttgaatttgatattttttattttgatattttgtatttttgaatttgatatttttgtatttttagtaggtaaaaaattaaaggtgtttatttaataaattgttgtaatggggagtttatgggaaaatgggtatgtgtaagttggttaaaggataataggtatataggttgtttgatttgggagggtttttagatagtaggatggtttttagagatgtatttttgttgttgttgttgtttatgattatgtttttagggtttagaatggtgtttgggtatagtaggtttttaatatagttagggaatgaatgagtttattttaattatgttgtatggatggagaaattgtgttttggggttgtattatgttatgtatttgtagaaaatgtttttgtttttttagtttttttttagtggtggagtataggatttagtttataagagtagtttaattttgttatttgtggaatgatagaataaataagttttagggtttagggaggtaaggtttttgttttagttttttaagtagttggaattatagttgtatgttattaagtttatttgattttttatttttttgtagagatgatgttttattatgttgtttagatttttttggaatttttgggtttaagtaatttttttatttttgtttttgaagtagttgggattataggtatttgttattaggtttggttagtttttattttttttgtagagatgggatattattatgttgtgaaggttggttttaaatttttggatttaagagaggtttttgtattggttttttaaagtgttgggattataggtgtaagttattttatttggatataatattttatttgaaataagaaaaatttttttttattgggaatgttgtagttgaattagtttaaatttataaagaatggaagattgtttagtggttatttatttatttattaattttagatgttaaattttttagggtgggggaatgtgtttttatatttaaggtatttttgaatgtagttaaattttgtagtttagttaaattttatagttaatagttaaattttgtagtttagttaaatttttttagtagtaaaatttatgatattggaattttgttttttatattggttatttgtaatagaataatagagttttagtattagataggttttgaaagattattgaatttaattttttttttttgttagtgagaattttgaagtttagatttgttgatttgtgattgatagtgttaaagataggtttgaaatatagatgttttgggttttagaggtgttgtttgtttttttttatattttttttgttttagaaaatttttttttaaaattggttttaataattagaggggaaagttatggtttttgttttggggatagtatgggttggtatagaaaagaggtttataatttagtaggaagtgttgtgtgtgtgtgtgtgtgtgtttgtggaggtgtagggagggttatttgagtttgttttgggtttggttttgggtttagtggtaaatttaatgttgggtaggtggtttgaggataatgatggtgttagttgtgagttagattttttttatttataaaattatgtttttttatgtagtgttttttaatttggttgtatgttaggagttatttgggtagttttgtaaaaattttaatgtttagttggtttgtattttttgagattttgattaaattgttttggagtttatttttttttttttattatttatttatttatttattttttaatttggtggtttttttgggattttttatatgtagtaggggttgagaattgttggtttttttggttagatgggaatatgtaggttaatagttatgtataaatagagtagtagagtaggatggtgttaaggttggaaagggtgagttatgaaagtttaggaaattagaataggaaggggtgagaatttttttatttgggtttgtggggtaggagagaagagtttagtgggtaaggtttagtgagtgtgtttagaattgggaagatgaggggaagggtaagtgttgggtggtggtgggtaagatggatgagattaaatgggagtgaggattttagtgagagttttggtgatatggaaggttgagaattggagggagtttgttgggtgaaagtgaaggtggttgttgggtaggtagttgaatttggttggagagttgagttggtgagatttataggaagtgaagggagttgtttagggtgtggtgtaatgagatttttagaagaaattttgaggtagagatggggggtttttgtttatatggagatataaggaagtttatatgtatatgtatgagtgtgtatatgaatatgtataagtatataaatgttttttttgggtagggtatatgtgtttgttgtataggttgaggttttggatttggaggggattgtagagttgatttataatttgggttttgatgttttttttggttgtgtttttatgattgtttgtgtaataggtggtggttttagtgggtgtttgttgtgtgttgttggagtttagtttagtttggtgtgtttgggaggagggagtagggagtggggaaggggtgtgttttggttgtgtgttgggattgtgagggtttgggaggggtgaggtgtgggggtggggttgtggtgtttataaagttgttttttgtttggatgtaaataaattttgtttggtttttagttggtgttgaagtttgttagtttattatttgtttttggtttttgtggggtgttgggttgttagttttggtattgttttttttttttttttttgtgttaggtaagtttgtgttttttttttttaggtgtgatgtggagtagaaaggggttgtttgtgtggtgttgttggagtgttaggattgttttttgtagttttgtgtattttaggagtaagtgttttggagttgtaagtgtgtggttattttggggtgtgggtgtgagggggttttgggtgtagatattgttgaagtggggggtttaattatggaaagggaggaaaaaaagatagggttttatttattttttttttagttggggattggggttttggaggttgggaagggggtgatgagatggtttgaaaaaatattaggatagtgttttttggtgttgtttttgaattttagttggtgttgttggtaggggtgtgtgttggatgtgggtgtagaagggattaggtgagtgtgtgtgtgtgtgtgtgtgtgtgtgtgtgtgtgtgtttgtgtttgggaatggagagattgtgtgtgagtgtgtagatgaggggttggtagaggtgagtggtgttggtaaggaggttggagaggggggtgtgggtgtgtttggtttgtagattgggttgggaatgggtgtggatttgagaggttggtggtgttttagttttgtagtatatatagggtggtgtgtatgtgtgagtgtaagtgtgtgtgtggggggagggtttagggtgtgttatagtgtaatatgtgagttggagtaagtgtttgtgagtgttattgggtagggtgtgtttttggaggaatttgggattggtgtattggtggtgtgggagaagtgatttgggtgagaggggttttgtggatatttggtggttttttgagttggttggagttaggagtggtgttatttttgtttttgtttatttttttttgtttttttttttttttttgtttttggtgttggttgtttttgttttttatgggggaaaatagttggaattattttgatgtttttgggggatttgttgtggtttttgatttagttttgggaggagattttgggttgggtttggggaatgtggttggttttgggggaaatatgttgttatgtttttgttaaattagtagttggagttgggatttagtgggttggttttttatttattttttttttatattttttgtttgttgtttttgttgtttttgggggttttgaatagtatgtttttgtggtttggaagtgggagatgtttggtagtgggtgggggaggtagggtttttggttattttatgtttatttaagaatattttttttttatggatgttgggggtattttagtttgtttggtttttttaagttattgggaaatatttaatatttagaagttagttagtggttaggtaggagggtggtagatatttttataatatttattagttgtatgggatttttttttaagttgttttaaaagaatatatttaaatataaattttttgtttttgttgtagaaatgtagttttaaggtgaattttttagtttagattttttttgttgagaaattttggtgtttttattgagttttataaatgtgattgaaataagtaaggtatagagggggtaaattttagtgttttttttggaagggttgttttttggtggggaagatatatggttggagatgtagattggttttgtgtggtgtgtgtggtggtagagttagttttaggttggggtggtatagtgttggggatgaaggaaggtgtaagggagagagagggttttggtgtggatggaaaattgggtgtttttttgatttgtgattttttagttttgtgggattgtgttttttattgtatttgggtaaggaggaggatttgtttgttttgttttgtaatttggtttttggtttagtgtttggtaggtgggaggagttgaaatatgtatatgggatgaagtggatggttttgggttttttgttttatttttttgtgaattagtaggttgagttttgggtgaggtaatagattgtgtatgggtggaggtgttggtttttgtttttgagggattttggagtgtttgtttgggttttttgtgaggaagtttttttggagtaataaagtttgattatttggaatggaataaaaaatttatataggatttatttagtttaatttttttttattttatagatggaaaatgaggtatagggatggggagggatgtgtttaggttgaattgagttggagtttagttttgtgagaggtttttgggtgggattgaaggtagtggaaagggtttttggtaggattttgtttgtttgttatggaggggtgaaaggaaattgtatttttattgaatttttggtgaggaaatttttgaggttaaaggggtagagtggaatgattttttttaagtgtaaattaggtgtttttgagagattagtaaagttagtttgaagggtaggggtttagaggttgtagttttttgagttggtttttgattgaatggggttgttttttttttatgatagaagatagattttaattgagttgagggtttttttgggttatgttgaaatttgttggtttgaatttgtttttttatggatttgaaagaaagatagtattgtgttttttgggtggtttaaagttgtagtttttttttgggatttaattttagagaattttattttagatgtgatttagaggttttgttttgggagagaaagtgtgatgatttagtatttgagatttaagtagggtttaggtttgatttagtttggaaggaaggttagggagggatatgatatttttttttttttagagtagttattgtttttttttatttgtttttatttttgtaagaatgttgtttggattgtattgttttattgaatggatgaggtaattgaggttaggagagttttaggatttgtttgttgttatatggtttaggtgggagagttagattttgaatttggatagttggattttagagtttttgttttttttttatgataatatgttggggtgtttgaagaaattaggtttaaatgaaaaggtagttaggagttttatgttttagtttgtttttttgtaaaatgagagtaatagatatgatgttattagaatgtgtaaatattaatttgtgtaatttgagaatagtattgagtatgtggaaaatagtgtgtaggtgtttgttgttagtagtatttgtagaagatatttttaaggtatttttttggtaggtagagtttgggattttttgttttaaatttatttaaggttgtgaaagtgtttgtaaatgtttgatttaggtattgttttttgttaagtttatgtaggttgtataatagtgttatgaaaattttgtttgaaatgtatatttttaggtttggttttttgtgattttttttttattaggggatatgttgttgttttaaagtttttttggttgggttgggaatggggtattttgtaggtagatagagttgagaatttttgttttggaatgataggggagagaagaaggaaggtgtagttatatatgttgttgtatttttaggttattttgtgtttatagtgttagggaattagtgagtgtttagtaaatagtttttgtttgttatagtgttttggaggtttaatgtattatattagttaattgaggtagaagatattttttttattttttaggttagaaaattgaggtttaggttggtgatttttttgtttagagtttagtgagtggggttttgtttaaggtgagttttttgagttttttttattttttaatattgtgtttggaggttatttatattttttgggtttattttttgagaaggagtttgttttttggatttattttaggttgttgtttttgttttttttgatggttgtgtgatggaagtattgtgtgtttatttgttttttattttttaatttggagatagaggtaggttagatagtggttttggttgagaatttagtttaggtaggtaggtagaagggttggggatattgaggttttataggaaggtggttgtagaggtagagggttatgagtaggtgttaatttggagttgtgtttttggggtgggggttatgtgaaaagaaatttgggtttttttgggtggggtgtaagttttagtattatagaatgggaatggattatataattggggttataagtaggtttttttgatttagatttttgatttttttatttaatattgtttgtagatttgtttatgttttatttgtttgggttttatttttgattttttgagtttagtgggtttttttgtaattgagttggtagaaagtgaggttttttaatagtttgggggttttgagtgttttttttagtagtttaattttttttttttttaaatttgtggggagattttttgtagttatatattttaaatttgtatagagttttgtttgaagagaggtgggtgggggtttaggtttttattttgtttttttgtttttattttttgttttatttttatggaatttaagaagattttaagtaattttttttaaatatggatgtgagagggttatttaagaggtgggtttatggttttttttagttgggaatgtttattatttttttttttttttttttaattatggaattttttttttttttttagaaaggtttttttggttgttttttgttggaggggaggttgggttgggttttttttgggatttgtttatgttttttatgaaatttgagagtttgtttttagtaggtgttgtgttagtggtggtggaaaggatatttttattgattaaggaagtaatttggattattttgtatagataagattggaggtttattttggagggtggaaattgtaagattattttggggaaggattttgttagtgtggttagtattttattttgggataaagggttttgtatgaggaagttatttttttgttttttgttaatattggttttgtttgtgtgatttttataaattattttagattatttagtgtagtttatgtttgttttgtaattttataaaataattttttaaggagattagtgtttttttttggatttttagttatttattttgtttttttagatggttgttttttgtttgttaaataaattatttgtgttgttaaaattttattgagaatttttaggaagattttggttgtattgtagaaaagaggtgggttttgatgagatttttgatatttttttttttttgttgttgtgtttgggatatttttgttgatttttttggtgttgtgtttaagttgaatatatagtagtttagttttagttttagtttttttggatttatatttagggagtgaatgtggttttggtttgtttgagagggagatagtggggtttatttttttagtgattttttttttattttttgaatattaaatattattgatgttttttgggttttaggttttattgtaaagtataggggtttttgaggagtttttattgtggttttgttttttgatatttgtattgtttttttgattttgattgttttgatatagttttttaatttttaaattagggaatttttttgaaggtttagtgaatttatttatattgtttgttgagttgattagttaagaaagatagtttgtgaagattgttaatttttttattttttttagggttttgagttttagaagggttagaaaatattaagagagtttatgaattgttttgtagtttgattttaaaatttttttgggtaaagaaatgataaaggattgtatttatagtaaggtagggttatttagggtttattttaaggtggttttttttgaggtttaggtagaaatggtgttgtttttggtaattttttggggaagttgttatagtaaatagttatagtatatgttgattttttttttttttttaaaaatttgttttataaagagtataatgtgttggagagaatattggtttttatgtggttttaaaattaggtatgttatagagggtggaatttgggttagttgttgttggtgataattgatgttatttttgttagtaatttttgtttgttttttttttatttgttttattgaaggtttttaggggattgttgtttgtttttttttgagggaatgagtgttatatttgtatttataataaattagtgagttttttattttttttttagtagggaggaatttagatatgtggtttttggaagttaagtgggtttttgtgtttgtttttgagttttaggttatttatttgtgaattgggtataatatttagttttttttggggtaatttttttgaggagtaagtgaaatagtgtgttgagtgaatgtttttttaaagtattgagttggttgttttaggaaggtattatgggggagttgaaaatagagaattttttgggtgttgtgaagggagaaaagtttaagatgttggttttgttaaaagtttaagtttgtttatgatggtttagtggtgattgtagggtggaggagaggtatgtgattgttttagttgatttttatatgttgaaagttttatggttatgtgtagtttattttataatgttgtatttgggttatgggtggtggtgaggattgtggatatatttagggtaatgtgagattattgttaatattttttttaaggttgttttaattttaaagtagttagtttgatgtttgttgatttggggtatatattttaattttttgatgttttagtttttttgtttgttaaatggtgatatgttggtattttttttttagggtttttgtgaggtttaaaggaagtattgggtttagagtttagttagtgttatagatattgtttttggtgttgtttttgtggtgtgtttgtgtagggttatattgttgtttttttgtggttgttttttttggtgggtggaatttggaatttttagaatagattatggatgtttttttgttggatatttttttagttttattttgtgggagttgtggtggggtttaggagagtttgtttaagagggtgtgtaggtgggtggtagagttggagtaaggtattagttttaatagataggagtttgaggttggtagaagtgggggttttggtttaaggtgtggggttaatttggttagagttgagtttggtagggttttggtaagattttgtggtttttttgttttggtgaagtatttttttgtttgggtttttatttgtttgtaagtttgttgtggatagtgtgatttttatagatgtatattgtgtttattttatagatggagaaattaaggtttagagaggaagtgatttgtttagagttatggaataggaaagtggtagggtttttatgttttgatttttaggttagtgtttttgttgttttattgaggtttttgggaattataggttttgtgtgttttttttagttttttaggggttgttgaatagtttttaagtggtgttggattattgaagatgtttttgtttattgtttttttaggttttagggttatgggttatgttttttttttttttgggtagattttggttttggttttgtttggtatttgtgatttagtttttttttgatttttttgggtttgttggattggaagggtatttgtgtagttttttttgggtttttattatttattgatagatagtgttggtggagagaagggttttagtggtgatgtattgggtttgataattagaaattttggtggtatttgttgagtattttttatgtgtttttttttttgttgggattttaggattgaaatttaggttatatttttatagatgttttggtatttttaaggtaattttgaaaggaaagtatgttgatgaattaagtaattgtttgtttaattttttatgttatttttgaatttaagttttattgttgattattgggagtaggagttagtatgtttattgatagataagtaaattgaggtaaagaggttagatagttaggtatggtggtatatgtttgtaattttagttatttaggaggttggagtaggaggattatttgaatttaggagtttgagattagtttgggtaatatagtaagattttgtttttttaaaaaataagatgaataatatatttttaaaaagagatttgataaattatgtaggattatagagttaataaatggtgatattatggtttgtaagtttttttttagtttttggttattttttgtttttttggtattggtttttttggaattttttttaggtaggtggatgggaaaagaagtgaagatataggttggtagttggtgttgtgatttggagttttgtttttggtgttaagttgggttttagttgaaggagatttgttggaggggttttttttgtgttttttggggagtaaagatggttttggagatggagatatggtttgttagttttaagttattttaaaggtggggttggtgggttaggagttagttttggtttttttgttatgttgtgtgtggttttgttttgttattttatttgttggaggatttttttgatgttttttagtgggttttaatattttgtgattaggattttgtatgaggtagagggagggtaggagttggagtttagtaaggattttaagtttagggataggttttatttgttatatttgttaagttgtgagggttttaggtgtttgggaggagggagtaggagtggaagtattagtttgagttgttaaattaggttatgtattatttgttattttttgttggtagaaggagattatagatattagaagatagtagtttttgttagaattgggtttttttatgatttttaggtggtgattttgaattttagaaaaagtgttttggggagagtggagtgaaggaagagtgtgaatattggatttgattttattttagtttttgtgttgtagttagtagggtgagtttaggatagttggtagttgtttgggtttagtttttttttttgtgaatgaaggtggtggggagtgtatgtgtgtgtgtgagtgtgtgtgagtataaatgattgtggatgtgagagtttatgaaagtgagaatgtattagtgtgtaagaaagtgtgagtatgtgagaatgagtgtgtttgtgagaatgtatgtatgtgtgagtataagtgtgtgaatgtgagaatgtttgagtgtgagaatgaaagtttgtaagtgtgttagtgtgagggaatgtgtgagtgtatttgagagtgtgtgtgtgtgtgtgtgtgtgtgtgtatgtatgtattagattaaataagaatgtatttaattgatattttttggatattgttatttattaggaattattaaaattagttattttagaggagggtggatgttgtattaggggatatttggtaatgtttgtagatttttttgttggttgtagtgtggggtgtatgttgtgggtatgtggtgggtagaggttagggatgttgttgagtttttttttgtgtttagggtagtttttaaggtagaggttgtttgtggggtttaaatgttagtagtgttgagttgaggatttttgtttaggaggtatagatgttgttttggatgttgtttagatagtatttgttttgttttttagggggatagatagatagtggatatagtttagatgtagtttgatgagtgagtttaagggagtgtttgtttttttgggattgtgagttttgtgggggtaggaattgggtttgtttgtttatgatttttagatgagttttatagttagttttattattatagttggtgttatttttgttttgagttttgtgttgggtatatagaatttagtgggtagaaatttttgaataaattttgagttttttattttgtttttgtgaatttagatgttttttgagggttagtttggtggtgtgggggttgggagtgggtagattgtagggagttaagttttggggtggagtggggtttaggtttttttttttggtttgagttgaagtattttggttttttaaattttaaaatttttattttttaatatttttatatgttgaatttttttatatgattttttttggataaaagtttttgtaaaaaaagtttgaaaagttttttggttgaggtattagggataaggtaagggttgtttgatgggtttaatttgggagaattgaggtgagggagttgttttttttttattttataggttggttagatggtggattgttagtagttggttgggttaatttgtagagagtattttttgtagtttttggtttatgtggttttagtattgtaggatgtgattaatatgtaggttattttgaggtttgtagtttttatagtttttttagattagtgtaaagttttatttagttttttggtagattttagagtttaggatattttttaaatggtttaaaattaatggaattatttgggggataataaataatgttattagatattgttaaatgttttttgggagagaaaattttttttagtttagatatattttgtgattatttttagtagttttatttttggattttttaaaggtttttagtagtgagggggttgggttagagaaggttttattagtttttaaaagtagatgtttaagaatttgatatttttaggatatatagtgatttttttaatttattgttttatgtggtttgggaagttaagttgtaggaataaaaaaggtgttgggtagggtaaagaggttttattagatagaggaaatggggaaggtggatatttttgttttttttgttttggagaatgagagagttggtggagattgatagatattatgttttaatgtgattatggtttttggaagttaaagagaattgattaaattgggttgaattatagtattttttgagtttttttaaatgtagaatttgttttttagatattgtatttttggggtttagtaatgatttaaaagtgaattttattgaaagtatgttgttgagttatattgtttatttatttagagagggagttgtagtttgattttttgtttaggagagttttttgtgttgggagttagaggtagagaaaagaataagttatttgtttgatgaagtttatagataggattgtttgaatttatttggtgggatagtgagagttttttgattttattttggtgtgttttgttgagtagggtatgttaagaagtttttgtgaaatgagaagtttttttatttttagaatgaggggtggtgttggtagggttttgggtttttggaaggttttttaggttatgtaggtgaggtgttttataggttagggttttgggattatgaatttgttgaattagtaaggttaatagatgtgggttttttatgttttttgtttttaagttggtagttgtttaggaatgtttataaatataaaattgattttgtttttagaatgttttggagtatagattttaaagtttgtataaagttatttttgtggggttggttatttattggggaaaattatgttggggttttagattagagtattttagtggagagtaggatttgtttatggaatgttatgtgttggtataagggatggatttggggtggatttggggtggtttgtatttgttggttgatttttaagaggtgttttattaggtttttgggagtttttgggtttttagaggagttttaggtaggaattttagaggtttgtatttttttgattattgtatttgaggggttttgggtagtgtggggtttaggtttttattttgaagttggttgtgtgagggttttggttaggtgttttttatttagaaagtttggatttgtgaattgggtgggtggtttgggttttttttttttgttatttattttttttttgttggttttttgttgttgtttgtaagatttgattttattttgtattttttatgttttattttagggattgatgggtatttagtttttttaatttgattattgatttagaagaatatatgtttatatttttggtttttagatttagtttttggaggtatgtttaatagatagtattatttgtttaagttttgtattttagggagttagtggtagtattttaagtttttttgggttgtgttttagtttggttttgtagtttatatttttgtatttgttttgtgttagagtataggtaatttttttggtttattttttgttttgatttaggaagtgttttttgttttggaggtttttttttttataaaattgtattgtgtgtttaaatgtttgttaaattttttgatttaaggtttttttttgtttttttttttttttagtaggtagttgagagttttgtattgtggggtgtgtatgtgtgtttatgtgtatgtgtgtgtttgtgtgtttgtgtgtttgtattattaattttttgttagggttaattgtgaggttgaagtttgtattatgtttatatgtggtaagtattgtgtgagtttgtgttttttttttattgttatatgggggttgtttgattttgggattagtaatgtaggtttttttttagaatgtagtgagttgtattttgggtatggtgggtgggtttgaatttggtatggggatttgtttgtgaggttgatttatttattttattgggagggtggtgtttgtgagttttagtatttttttttaggaaatttattgtgttggttttaatgggaagattgggttgggtttatgggttgtgtgtataagggatttttttattttttgtagtgtattatgagggaggtgaagttgttgggtagagtgtaggtttggtttttttgttattggttttggatttgttttttttaggaaattttttagtaggaagtgttgattttttggtttttgtttttttgtagg

SEQ ID NO: 289 - DNA, 17897 bp, Artificial Sequence
  chemically treated genomic DNA (Homo sapiens)
tttgtaaggagataaaggttaaaaggttaatattttttgttgagaggttttttaaaggaagtaaatttaagattaatggtaagaaggttaggtttgtgttttgtttagtagttttattttttttgtgatgtattgtaggggatgaggaggttttttgtatatatagtttatggatttaatttagtttttttattggggttagtgtagtggattttttgggagaggatattgaggtttatagatattatttttttaatgaaatggatagattagttttataaataggtttttatattaagtttaggtttatttattatatttaggatgtagtttattgtattttagaaggggatttgtattgttgattttaaagttaggtagtttttgtgtgataatgaaaggggaatataagtttatatgatgtttattatgtataggtatagtgtaagttttagttttatagttagttttaatagaaggttggtgatgtagatgtatagatatataggtatatgtatgtgtgtgaatatatatatatattttatggtgtaggatttttggttgtttgttaaaagggaagaggggtagaggaaaattttaagttaaggagtttggtaggtatttgaatgtatagtataattttgtaagaaaaaagatttttaaggtagaaagtattttttggattaaagtaggggatggattagaggggttatttgtgttttaatatagggtaggtgtagaagtgtgggttgtaaaattagattgaagtatagtttaggaagatttggaatgttgttattgattttttggggtgtaaggtttgggtaggtggtgttatttattaagtatgtttttaagagttgaatttagaaattagaagtataagtatgtatttttttagattagtagttaagttagaaaaattaaatgtttattaatttttggggtgaagtataaaaaatgtagaataaggttaagttttatagatagtagtagaggattggtggagaagaagtaagtgataagagggaagagtttaggttatttatttagtttatagatttagattttttgaatggaaaatgtttgattaaagtttttatatagttagttttagagtgggaatttgggttttgtattgtttaaggttttttggatgtaatggttgagagaatgtaagtttttgaaatttttgtttagggtttttttgaagatttaggaatttttaagaatttggtgaaatattttttagaggttagttggtaagtgtgggttattttgaatttattttgggtttattttttgtgttaatatatggtattttgtgggtagattttgttttttattggggtgttttggtttggggttttagtatgattttttttagtagataattagttttataagaatggttttatatagattttggagtttatgttttagaatattttgaaaataaagttggttttatatttgtgagtatttttgggtagttgttagtttggaggtaggaggtatgaaaggtttgtgtttgttagttttgttaatttagtaggtttgtggttttaagattttggtttgtgggatattttgtttatatggtttagggagttttttagaaatttagggttttgttaatgttattttttattttgggagtgaaaggattttttattttataggagttttttagtatattttgtttagtaaagtgtgttagggtgaagttagggggtttttattgttttattaggtgggtttaagtagttttatttgtgagttttattaagtaggtagtttgtttttttttttatttttagtttttagtatgagagatttttttaggtagaaagttaggttgtaattttttttttgaataaatgagtaatgtagtttaatagtatgtttttagtaaaatttatttttaaattattgttaaattttaagagtgtaatgtttggaaaataaattttatatttaaaaggatttgagaaatgttgtggtttagtttagtttggttagttttttttggtttttagaaattgtgattatattaggatatagtgtttgttagtttttattagtttttttgttttttagaatagaaaagatagaaatgtttattttttttgttttttttatttggtgaaatttttttattttatttggtattttttttatttttatagtttagttttttagattatatgaggtaatgggttaaaaaaattgttgtgtgttttagaaatattaagtttttgagtatttgtttttgggagttggtggggttttttttgatttagtttttttattgttaaaggtttttgggaagtttagagataaaattgttgaggatgattatggggtatatttaaattaggggggatttttttttttaggggatatttggtaatgtttagtgatattatttattgttttttaaatgattttattgattttgaattatttaggaagtgttttagattttgaagtttgttgggagattggataaagttttgtattagtttggggggattgtgggggttgtaggttttggggtagtttgtatgttggttgtgttttgtaatattaaggttgtatgaattaaggattgtagaaggtgttttttgtaggttgatttagttagttgttggtggtttattatttggttagtttgtagggtgggaggagagtggtttttttattttagtttttttgagttgggtttattaagtagtttttattttgtttttgatgttttaattaaaaaattttttaaattttttttgtaggagtttttatttaaaggaaattatgtaaggaagtttaatatataaaaatgttaaaaaataaaaattttaaaatttaaaaagttaaggtgttttggtttaagttagggaaaggggtttgaattttattttattttaggatttggttttttataatttgtttatttttagtttttatgttattaggttggtttttaaagaatatttgagtttatggaagtaggatggaaaatttaggatttatttagaggtttttatttattaggttttatgtgtttaatatagagtttagaataaaaataatattagttatggtgatgagattggttatgggatttatttggggattatgagtaaatagatttagtttttgtttttatggagtttatagttttgaggggataggtatttttttgggtttatttattaggttgtatttgggttgtgtttattgtttgtttgtttttttggagggtagagtagatgttgtttggatagtatttaggatagtgtttgtgttttttggatagagatttttagtttagtattgttgatatttgggttttataagtagtttttgttttaggggttgttttgagtatgggaggaggtttagtagtatttttggtttttgtttattatatgtttatagtatatattttatgttgtgattagtaaaagaatttgtaaatgttgttaaatgttttttggtgtgatatttatttttttttggaatagttgattttagtaatttttagtaggtaatagtatttagaaaatgttagttggatgtatttttatttaatttagtgtatgtgtgtatatatgtatatatatatatatatatttttaaatgtatttatatatttttttatattgatatatttgtaaatttttatttttatatttagatatttttatatttatatatttatatttatatatatatatatttttataaatatatttatttttatatatttatatttttttatatattgatatatttttatttttatggatttttatatttatagttatttatatttatatgtatttatatgtatatgtgtattttttattatttttatttatggaggagggggttgggtttaagtggttgttagttgttttgagtttattttgttggttgtagtataggggttggagtggagttagatttaatgtttatattttttttttattttattttttttaaaatattttttttgggatttaaagttattatttgagaattatggaaggatttagttttggtagaagttgttgttttttggtgtttgtgatttttttttgttagtaggaaatggtaggtgatatgtgatttggtttggtggtttgagttggtgtttttatttttgttttttttttttgggtatttgaggtttttatggtttagtaagtgtggtaggtggagtttgtttttgggtttgaggtttttgttggattttagtttttgttttttttttgttttatgtaaagttttaattatagaatgttgggatttattagaaagtattaaagaggttttttagtaggtggggtggtaaggtagggttatatatagtatggtgggggaattagggttgatttttagtttattagttttatttttggagtggtttgggattgataaattgtgtttttatttttaaggttatttttgttttttaagaagtatagaagaaatttttttagtaggttttttttagttaaaatttagtttagtattaaaaatagggttttaggttatagtattagttgttagtttgtatttttatttttttttttatttatttgtttgggaggaattttgagaagattaatgttagagaagtgaaaggtagttaggagttgggggaaggtttgtaggttatggtgttattatttattagttttgtgattttgtataatttattgaatttttttttaaaaatgtattatttattttgttttttagagagatagggttttgttatgttgtttagattggttttaaatttttgggtttaagtgatttttttattttggttttttgagtagttgagattataggtatatgttattatgtttggttatttaatttttttgttttagtttgtttgtttgttaatgggtatgttaatttttgtttttaatgattagtagtggggtttaaatttaagaatggtatggagaattaagtaaatagttgtttaatttattaatatattttttttttagggttgttttggagatgttaggatatttgtgaggatgtggtttgggttttagttttagagttttagtgaggagagggatatatggaaaatgtttagtaaatgttattaaggtttttgattattaggtttagtgtgttattattggggtttttttttttattagtattgtttgttaatgagtaatgagggtttaagaggggttatataaatatttttttagtttagtagatttaggagagttagaggagagttggattataggtgttaggtaaagttaaggttaggatttgtttgaggaagaaaagaatgtgatttgtgattttgggatttgggagggtagtgggtagaggtatttttagtaatttgatattatttgagaattgtttaatagtttttgggggattgagggggatatatagagtttgtgatttttaaaaattttagtggggtagtaggaatgttggtttaggaattagggtatggggattttgttatttttttattttatgattttgagtaagttattttttttttgggttttggtttttttatttgtaaagtaggtatagtgtatgtttatggagattatgttgtttataataaatttataggtaaatggaaatttaggtaggaaggtgttttattaagataaaagggttatagggttttattaaggttttgttaggtttagttttggttagattagttttgtattttggattaaggtttttatttttgttagttttagatttttgtttgttaagattagtgttttgttttagttttgttatttatttgtatatttttttgagtaaatttttttgggttttgttataatttttatagggtgaggttgaaggggtatttagtagagaaatatttatgatttgttttagaagttttaggttttgtttattaggaagagtagttataggaaggtaataatgtaattttatatagatatattataaaaatagtattaggaatagtatttgtggtattaattggattttaaatttggtattttttttaagttttatagaaattttaggagggaggtgttagtatgttattatttaatagatggggaaattgaggtattaagaggttaagatgtgtgttttaagttagtaagtattaagttggttgttttaaggttaaagtaattttaaagggaatgttgataatgattttatattgttttaaatatatttatagtttttattattatttgtggtttagatataatgttgtaaggtgggttgtatgtgattatgaggtttttagtgtgtggaggttagttgggatagttatatgttttttttttattttgtagttattattgagttattatgagtaggtttgagtttttggtaaaattagtattttgaatttttttttttttataatatttagaaggttttttgtttttagtttttttatagtatttttttaagatggttaatttaatgttttggaaaagtatttatttagtatattgttttatttgttttttaaggaggttgttttgggagaggttgggtattatatttagtttataaatgggtaatttgaggtttaaaaataaatataaaggtttatttgatttttaaaggttatatgtttagatttttttttattgagggaaaggtgaaaaatttattggtttgttgtgggtgtaggtgtggtatttatttttttgggggagggtggataatagttttttggaggtttttagtgaagtagataaagggagagtaggtgggaattgttgataagggtagtattgattgttattaatagtaattggtttagattttattttttgtaatatgtttggttttaaggttatatgaaagttagtgttttttttagtatattgtgttttttatagaatagatttttaaaaggagggaaaaaattaatatgtgttgtggttgtttgttgtagtaatttttttagaaaattgttgagaatagtattatttttgtttgaattttaaggaaaattattttgagataggttttggatagttttgttttattgtggatataattttttgttatttttttgtttaaagagattttgaagttaagttataaagtagtttatgggtttttttggtgttttttggtttttttgaaatttaaggttttggggagggtgaggaagttggtagtttttatgaattgttttttttaattaattaatttagtaaataatatgggtggatttattggatttttaagaaagttttttagtttagaggttagggaattgtattagagtaattagaattaaggaaatagtataaatgttagagaataaaattatagtaggaattttttgagggtttttgtattttgtagtggagtttgaaatttaggaggtattagtgatgtttgatatttaaggaatgaaaaagggattattaagaaggtgaattttattgttttttttttaaataagttaaagttgtatttattttttgggtgtgggtttagaggggttggagttgaaattgaattgttgtgtgtttaatttgagtatagtattagggaggttagtaagagtgttttaaatataatagtaggaagagggaggtgttaggaattttgttagggtttattttttttttgtaatataattgagatttttttggagatttttagtggagttttggtagtatgagtaatttgtttggtagatagaagatgattgtttgaggggatgaggtgaataattggaagtttaaaggaggatattggtttttttagaggattattttgtgaaattgtaagataggtatgagttgtgttggatggtttgagataatttgtggaaattatataaatggagttagtgttagtagaggatgaggaaatggtttttttatatagaattttttgttttgagatgggatgttagttatgttaataggatttttttttagaatggttttgtagtttttattttttggaatgggtttttgattttgtttatgtaagatggtttaagttatttttttaattagtggagatgttttttttattattattaatataatatttattaaggataggtttttaggttttatgggagatatggataggttttaggaaggatttaatttagttttttttttagtagaggatagttaaggaggtttttttggagaaaggaggagagttttatgattaaaaaggaggaaggagagatggtaagtatttttagttgagagaggttatagatttattttttaaatggtttttttatatttatatttgaagagggttatttggaatttttttaggttttgtgggggtggggtagagggtgaaggtaggagaataaggtggagatttgggtttttatttatttttttttaaatagaattttatgtagatttaaaatgtatagttgtagaaagtttttttatagatttaaagaaaggaaagattaaattgttggggagggtatttaaggtttttagattgttaaggagttttattttttattagtttagttgtaagaaaatttgttggatttaaaaggttagagatggagtttaggtaggtagggtataggtaggtttgtaaataatgttaggtgggaaagttaaagatttgggttaaagagatttgtttatggttttgattgtgtaatttatttttattttgtagtgttggggtttatgttttatttgagggagtttaggtttttttttatatggtttttattttgagaatatggttttaggttggtatttatttatggttttttatttttgtagttgtttttttgtggggttttagtgtttttagtttttttgtttatttgtttgggttaagtttttagttaagattgttatttagtttgtttttatttttaagttgaaagataaaaagtaagtggatatgtggtatttttattatatagttattaagggaggtaggaataatagtttggggtggatttaggaaataagtttttttttaaaaggtgggtttagagggtgtgggtggtttttaagtgtaatgttggagggtggaaagggtttaggaggtttattttgggtagaattttatttattggattttggatagaagagttattagtttgagttttaattttttgatttgagaggtggaaagaatgttttttattttagttagttgatgtgatgtattgaatttttaaggtattatagtaaataagagttatttattgagtatttattaattttttggtattgtggatatagggtggtttgaaggtatagtggtatgtatgattatattttttttttttttttttttgttattttagagtagaggtttttaattttgtttgtttgtaggatattttatttttaatttagttaaaggagttttgaaataatagtatattttttgatggagagagaattgtaggagattgggtttggaaatgtgtattttagataagatttttatgatattattatgtaatttatataagtttagtaaaaagtaatatttaggttaagtatttgtaggtatttttatagttttgggtaggtttaggataaagggttttagattttgtttgttaagaagatgttttgagaatgttttttgtgggtgttattgatggtaaatatttatatgttgttttttatatgtttagtgttgtttttaggttatatagattaatatttatatattttgatggtattatgtttgttatttttattttatagaaaagtaaattgaggtatggagtttttgattgtttttttatttgagtttgatttttttaggtgttttaatatgttgttatggaaaaaaaataaaggttttgaagtttaattgtttgggtttaaagtttggtttttttatttgagttatatggtaataggtaaattttgaaatttttttggttttagttgttttatttatttaatggagtaatatgatttaggtaatgtttttgtgaggatgaaggtagatggagggagatagtggttgttttggagggagagagatgttgtgtttttttttggttttttttttaggttgagttaaatttgaattttgtttgagttttagatgttgagttattatgtttttttttttaggataaggtttttgagttatatttggaatgggattttttggggttgggttttaaggaagaattgtagttttgggttatttgaaaaatataatgttattttttttttaggtttatgaggaggtaagtttaggttagtggattttaatgtaatttaggggggtttttagtttagttgagatttgttttttgttatggggggggggtagttttatttagttaaaggttaatttagggggttgtagtttttaagtttttgttttttaggttggttttgttaattttttaagaatatttgatttatatttaaaaaaaattattttgttttgtttttttggttttaaaagtttttttattagaaatttaatgaagatgtaatttttttttgtttttttatagtaggtaggtaaaattttgttaggaattttttttattgtttttagttttatttaggagttttttataaagttgagttttagtttagtttggtttgggtatatttttttttatttttgtgttttattttttatttgtaaaatggaaagaagttggattaggtaggttttgtgtgagttttttattttattttaaatgattaaattttgttgttttaaaagaatttttttataagagatttaaatagatattttaggattttttaaaagtaaaagttaatatttttatttatgtatagtttattattttgtttgaaatttaatttgttggtttataggagaatggggtagaagatttagagttatttattttattttatgtgtatattttaattttttttatttgttaggtgttgggttaggggttaggttatagggtagggtaggtaaatttttttttttgtttagatgtagtgggagatatggttttataaagttaagaagttataggttaggggaatatttagttttttatttatattaaaatttttttttttttttatatttttttttatttttgatattgtgttattttagtttggggttggttttgttgttatatatattatatagaattggtttgtgtttttagttgtgtgttttttttattagaaggtagtttttttaagaaaggtgttggggtttgttttttttgtattttgtttattttaattatatttgtgaaatttaataagaatgttagaattttttaataggaagagtttagattgaaaaatttgttttgaaattatatttttgtagtaagaatagggggtttgtatttagatatgtttttttgaggtagtttaggagaaggttttgtgtagttgatgggtattataaggatgtttattgtttttttgtttggttattggttgatttttgaatattagatattttttagtagtttaaagaaattaaataaattgaagtgtttttagtgtttgtgaggaaggggtgtttttggatgggtataagataattaagggttttgttttttttatttattgttaggtattttttatttttaagttatagaggtgtgttgtttaggatttttagggatagtagggataataggtgggggatatgggggaggggtgggtaaggaattgatttattaaattttagttttagttattaatttgatagaggtgtgatagtgtgttttttttagaattagttgtattttttaagtttagtttgaaatttttttttgaggttgaattagagattgtggtggattttttaggaatgttgaagtaattttagttgtttttttttgtggagggtaggagtggttagtattagaggtaggggaggggaggaaagtgggggagggtgggtggaggtgaaaatgatgttatttttagttttagttagtttaaggggttgttaaatgtttgtgagattttttttgtttaggttattttttttatgttgttgatgtgttaattttgggtttttttgggggtgtattttgtttagtggtgtttgtagatatttgttttggtttgtgtgttgtattgtgatatattttggattttttttttatatatatgtttatatttatatatgtatattgttttgtgtgtgttatgggattgaagtgttattagttttttggatttatatttgtttttgatttagtttgtaagttagatatatttatgtttttttttttagtttttttgttagtgttatttatttttattaattttttatttatatatttgtgtgtaatttttttgtttttagatatagatatatatatatatatatatatatatatatatatatatttatttagttttttttgtatttatgtttagtgtgtatttttgttagtggtgttagttgggatttggagatgatgttaggaaatgttattttggtatttttttggattgttttattgttttttttttgatttttagaattttaatttttagttaggggggagatgaatgggattttgttttttttttttttttttttgtaattgaattttttattttagtggtgtttgtatttaaagtttttttgtgtttgtgttttggggtgattgtgtatttgtagttttggggtgtttatttttggagtatgtggggttataaagggtggttttggtgttttagtggtattgtatgggtggtttttttttgttttgtgttgtgtttgggagaagagggtgtgggtttatttaatgtgagggagaaaggaaaggatggtgttgaggttggtggtttagtgttttgtggaagttgagggtggatggtgaattgatgagttttagtattagttgggagttaggtgaggtttgtttatgtttgggtggagggtgattttataggtgttgtggttttgtttttgtgttttgttttttttagatttttgtagttttagtatgtagttgggatatattttttttttgttttttgttttttttttttgggtgtgttgggttgggttgggttttggtagtgtgtggtgggtgtttattggagttgttgtttgttgtgtaagtagttgtaggggtgtggttgggaggggtattggggtttgggttgtgggttggttttgtagttttttttgagtttagggttttggtttgtgtagtgggtgtgtgtgttttgtttggaggaggtgtttgtgtgtttgtgtgtgtttatgtgtgtgtttgtgtgtgtgtatgtggatttttttgtgtttttgtatgggtggaggttttttatttttgttttagagttttttttaagagttttgttgtgttatgttttgagtgattttttttattttttgtaggttttattagtttggttttttagttggatttggttgtttgtttagtagttgtttttgtttttgtttgataggttttttttgatttttagttttttgtgttgttaaagtttttgttgaaatttttgtttttgtttaattttgtttattttgtttattgttgtttagtgtttatttttttttttatttttttagttttaagtatatttattggattttgtttattgggttttttttttttgttttataagtttagatgagaggatttttatttttttttattttgattttttgaatttttatgatttattttttttaattttagtattgttttgttttgttgttttgtttgtgtgtaattattggtttgtatgtttttatttggttaaagaaattagtaatttttaatttttattgtatatgagaagttttagaggagttgttaaattaaaaaataaataaatagatagataataaaaagagagagatggattttagaatagtttaattagaattttagggggtgtaaattaattgggtattggggtttttataaagttatttaggtggtttttgatgtgtagttaggttgagaagtattgtatggaggaatatgattttatgaataaaggaagtttgatttatagttggtattgttattgtttttaggttatttgtttagtgttgaatttgttattgagtttaggattagatttagggtaagtttaggtgattttttttgtgtttttatagatatatatgtgtgtatgtataatattttttgttgaattgtaaattttttttttgtgttaatttatgttgtttttaaggtaggggttatggtttttttttttgattattagggttagttttggagaagggttttttggaataaaagaaatatggagaggggtaaatagtatttttaggatttaggatatttgtgttttaggtttgtttttgatattattgattataaattaataaatttgggttttagaatttttattggtaaagggagaggattagatttaatgattttttagaatttatttagtgttaaagttttgttattttattataaatgattagtgtgaagaatagagttttagtgttatgggttttgttgttagaagagtttggttaaattataaagtttggttattagttatgaagtttggttaaattataaagtttggttatatttaagaatgttttgaatgtaggagtatatttttttattttagaaaatttaatatttagaattaataagtgaatgaatgattattgggtagttttttattttttatggatttgaattagtttaattgtagtatttttagtgagggaaaattttttttattttaaataaaatgttgtgtttaggtagagtggtttatatttgtaattttagtattttgggaggttaatgtagaagttttttttgagtttaggagtttgagattagtttttataatatagtgatgttttatttttataaaaaagatgaaagttagttaggtttggtggtaagtatttgtagttttagttattttagaggtagaggtgggaggattgtttgagtttaggagttttagaaaagtttgagtaatataatgagatattatttttataagaaaataaaaaattaggtgggtttagtggtatgtagttgtagttttagttatttgggaggttaaggtaggagttttgtttttttaggttttgaaatttatttattttgttattttataaatgatagaattgagttgtttttatgagttgggttttgtattttgttattgggaaaggattgaaaaggtaaaaatattttttataggtgtatagtatggtatagttttaagatgtagtttttttatttatatagtgtggttgagatgaatttatttattttttaattatattaaggatttattatgtttaggtattattttagattttggggatatgattatgaataatagtaataataaaagtgtatttttgggagttattttgttgtttaaagatttttttagattaagtagtttgtgtgtttgttattttttagttagtttatatatatttatttttttataggttttttattgtggtgatttattgagtgagtatttttggttttttatttgttaaagatataagagtgttaagtttaaaagtgtggagtgttaagataaggaatgttaagtttaaaggtgtagggaaggtggtttatttttttagtaataaatggaattagtgtatggaattagaagggtattttgttaggggaggtttttgtttgtttttttgaggaggtttttaggatagaatgtgaagagtagtttagatttgtagtttgaaattttgaggaggttgtttggtaggaggttgggtttgtgtgggaagtttaattttttggaagattattagtattgaataggttagaagatagaggaaggagagtggagtgaagagaaaagagtagagaagggaggtaagaatttgagtaatggaatataattttttaagtgatggtattttaaaattagagtttatattattttggagaaggtttgaggaagatattatttggattttatattttttttttttagtttaatatagttaattttttttttttgttgaaaaggatgtttttttttgttgagtattagatgaagtagtttttttagttaagtgttatgttgtaggagaaagattgtttttagtataggtttggatgtatataaagtatagaggatgtttattttatatagaggttttttattgggatttgggagttgtatgtatttttatattttttattgtagttagttgaggtggtagaagtttatggagttgaatgtgggtgtaattgtattgattgtttatattattttttttttttgttggttagtagtagaattagatttgtttagtaaatgtatatgtgttgtaaatttgttataggatgagattggattttttggattaatgtttattggaaatttttatttaataataatttagattttatattagaatattttaattaaatgttttaaaaatgattataggaattatttgtttttaattgttttttttaaaatttatgggtatttggggttgggagagattaagatgtagtagggatttatggagaagaatttggtggtttgtggtttttagttttaattttattatttatgagttgtagtatttggggtaaattattttatttttttgtgtatggaggaaatgagtgagagaaattattagattttttaattataatttatgggtttattgttgtagattattattttttttgtttgttaaaatgaaaaagtgtttgtaaaagtgtttttttatttttagttttgggtttttttgggatttttttttttttttagtatttattttttttttttttttggattaaattaattaataagtaaatatttattgtaattaatgatttattttaaattaatttttttttaattttaagttttttatttttgtattgtagtttaattaataagtaaatatttattgtaattaatgatttattttaattaattttttttgatttttaagttttttatttttgtattgtagtttagttttttttatttttttttttttaaattttttaaaataagtatttgtatttaaaggtttattttatttttttttttttttattttgtagtgattattaagttttttttgaatttggttaaataagtttttaaaatttgttaggaaaaataatagtttttgtttttttatttttttatttttttatttttagaagttattattttttgtttttggagaattatttttattttatttttgttatttgtagattttatgtttttgggtaagttattttattttttttttttgtttttttatgtataagatatatataataatatagggttattgtgataaatatatgtgttaatatatgtaaagtgtttagaatagtttttggtatatagaaggtttttattaaagtgtttatttttatttttattgttattattattattattattattattattattattattattattttgttttattttttttggtattttgtatatttgattgtagagaagtttagtaaatattggttgaagaattgagtaaatgtagatgtttttttttgaatttattttattttatttggttttattgtttggattttgttaggagggaaaaggggattttatttgttttatgattttaggtggagggattgttatttgggatttttatttaagtaaaagtaaattattttagttatttgtaagtatgtttggtttgtaatattatgttgtgagtaatgaaaattaaaaaaaaaaaaaattatgaaaggaaaataattttaaatgagggtgaagggtaggttatgtttaggatgtgtaataaattttttattttgaatataaatgaagagttgtgtaatgt

SEQ ID NO: 290 - DNA, 5987 bp, Artificial Sequence
  chemically treated genomic DNA (Homo sapiens)
tttttaatttgtattattttttttattttaataattttttttaatattttttataaagtagatttattggttatagaatgttttaatttttatttgtttgagaaaattttattttttttttatttttgaaagataattttgtagggtatagaattttaggttgtaggttttttttttttaaagtgaaatattttattttattttttttttttttgtatggtatttgagaagaagttagatgtaatttttattattattatttaaaagattgtttttgtttttttttttttttttttttttttttttttttttttgtatattatattttttatagttgttttatattttttagatattatgttttggtttttttttgtgtttttttttttgatttttagttttagaagtttttatttatatatttgtaattgtagggatttttttttttgttatgtttagtttattaataagtttttatagatattgttgatttttgttttagtgtttttgatttttagtatttttttgattattttttggaattgttatttgtttatttatattattaatttatttttgtgtgttgttttattatagtaattgtagttgttttaattttataggtattgtaattttaatatttttattatatttgatattgattttgatgtttgttttgttttattaagttatgtttttgttttttagtgtgatttttaattttttgttgaaagttaggtatgatgtattgagtgaaagaaatttaatatattgtaatgtgatgataagagtttaggggaagtgaagtattttatagttttatagtaggttttggttttttagtgagtttgtgtttatgaatggtgatttttaataagtgttttttattttattttttttttgtttttaagtgggataagattattgggggggggttagaattgggtattttttttttttaatgtagaagttaaagagagggttggagttgggtatttttttttttttgtatggaaagttagaggtagttaaatttggatatttttttttttttaatttagttaggttgtgataaaaattttgatagtttaggttttaatattataaaataattttttttgagtataggttttattaagaatattatattttgatggagttgagggggagttttttttgatatttattgtgagaattttgtagagttttaggaagtaaaatttataaaagtgtgggagttttttagaattttttttttgtagatttatttgtattgaatttttagaaatttattaattatagtttaggtttttttatttaggtattggtttttatggaggtttttgtttgtgtatttttgttttagtaagttgttttttttgtatggtttgttttttaaattttttaagtagggttatgatttgttgttttatttttttgatagttttgagagtgttgattttttagtttgtttagatttttatttgtttttaggatgaagtgataatttttaagtttttttttgatatgttagattagaaattgaaagttttaagttttatattttgtgtgtgggtatgtttatattttgtttgttttagtgtttttattttatatttttttttttttttttgtttttttgtgagatttttaggtttaatataaagattgtgtttaatttatttaattattttggtttatttgagtattataatgaataattataaaaaaaaatgaagtaaaagaaaaatttattaaagaattgagatatttgagaaaaagaaaggagattagtgttttataaaatttagaaatagattttttaagtgtttttttattgatttatgtgaaaggattttttttaatttaataaattatgtgtttttgtttatagttttaaaattttttgtgtagttaagaatgggtaaataattaggttttattaaaggattaatgtaaagattttttgtaagtaatatttttgttatttaaggaagagataaattttatggtataattttgttaaagtatattaagaataattttgatataaagttttttttttagttaatatgttatgaaagaaagaagataaggggtgatttttattttttaagtgaattattaaatttattaaagaagaaatgagggaaatagaaagaggatttttgtttgagataatggatttgtatgtatgagtagtagaattttgtttaaagtataaggaagggaaaaaaaagttagtttatttggaattttggatattaagagtttttattgtttatttttttttaatttatatgaatggtttattattttaattaataaatattttatttttttttaatatatttatgaaataaatttgaaatgaatagtgtaatatgtgaatgtttagaatattataaaattaaatataaaatttgtttggtaatttttttagtattttaggaaaaaagttgataaaattttaagtagtagaagggggtagtaaaatttaatagaaagttttggaagatttttaagatttttttttattttttttttatgtagattattttttaataaattttagatgttaatagaaattttgtataatagatttatatatttgtttaaaatagatatagaaatattgaatatatgtaaatatgagagttataagttttatatgattaaattttttttttatggtatataatagttatagtatttttttatataaaataggtttagtggttttaatttagtttggtatatttaatatatttttatgattagtattttaaatgtatttatttgttttattttattgttttagaattgttagttatttaataaattatgtaatttttttttttatgtttagatttgtatttttttttaaaattttgtttatttttaaagttttagattttttttgaatttttttttttgattttttaagtatatggaattttttattttattttgttatataagtgatagaatttttattatgggatagatggagtttaatttttttgagtttaaaataatttaaatataattattttttatgttttgttttttttttatttttgtatttaaatttttttttagataatagaataattaatgtttgataaggaagataatgatgatgattattttaaaatgaatttaggattgtaatgtaaaattttagtatttttttatagtatggattttaatatggtttttaatttaaattaatattagtagttttaattataaattttaaattttagtagatgtaatttatttttttaaaatgaaatagaagattgaaattattaaattattaaaaagaaaatgatttatgtttttagttgaaattttatgtaagattttatgtaataaataggagtgttataaatggaatgatgaaatatgattagaggaggagaaaggttttttagatgagatggaattttagttatttgtgttttatgaagaattagatgtgtatattaagtaaaatagttaaaaaaaaaatttttaagtgagttttttatttattttttttttataagatttttataaattgaggtatttggtgtagttttattttaggttttatgttgttatttttttgtaatgttaaggatttaggatataattgaattttttattttttattttttttttggtgtgtgtgtatatatatatgtatatatatatatatatatatatatatatatattttttagtattttatttttatatgtttttttttgagtattatttatgatagatgttaaataaaagtaaagatgaaattttaattgttaaaattttttttttatttaattaattttttatttaattatgttttaaaatgagaatagaaaattagttttaataagtttaggtaattgaaaagtaaatgttatgttgtattttgatttatggttataatttataattttggaaaagtggatagaaaagataaaagagtgaattttaaaatttgaatttattttattagtattttttatgaagggttagtaattaaaataatttatgtattagggagagaaatgttttaaggtatatgttttggatatttagtgtttttgtaaattttggttattgttgttttttttgtttattagaaggtaggaaattttatattggtgatttgtggagtttatattaattatttatagggtaattgtttaggattagtattatgaggagaatttattttttttgtttttttttttaagaaataaggagggggtgaaggtatggagaatagtattttttttgttgaaagtaatttagttataaagataaattatagttatgtatattgaaggtagttattttattttataaaataagagttttttaaaaagttatgtatgtatgtgttgtatatagagtagatatatagtttattaagtgttgttattaaaatataaaatatgttagttttttttaattttatttgttttagtttgttttgatgtgatttttttgattttttaaagatgtatagattagatatggtggtggtggtgggagaggggattttttgtgtttttggattttagggttgtttagatttttggagaggaagttaagtgtttttttgtttttttttggtattttatttaaggtgattagtttagaattggtttttggaagtgtttgggtaaagattgtgaagaagaaaagatatttggtggaaatttgtgtgtttggggtggtggaatttggggaggagagggagggattagataggagagtggggattattttttttgtttttaaattggggtagttttttgggtttttgatttttttatttttgtgggtaaaaaattttgtttttattgggtttatgtaatttttttaaggggagaggagggaaaaatttgtggggggtatgaaaaggtggaaagaaatagttattttgttatatgggtttggtttttagttttataaaaaggaaggtttttttggttagtgattaattgttatatgatttgtagtgagtgttaggagtatgtttaggaattttttagtagtgttttttttagttttatagttagatgtttttagatagtaaagtttatttttgtgttgtgttttgtttgttgttgtgatgtttgtttgtgttttgttgttgtgtgtggttttggtgtttagttatataggtgagtatttggtgttgtgtattggggattttggttttatgtatttgggtagagtttttgttttgattttttgggtttattttagtattttgatttttttttgaatagagaagttatgtgatttgggaaagagtttggattgttagagtttgaaagaattttgtggatattttagtttttttataagtattgattattatgagttagttatttaattgatttgagatatttttattttttaaatagggatagatgatattaatttgtaggttgttattatgataagataggatttgattaatatatgtgaattgtttatatttggaatttttttattgagtggaagaagttgttttaaatattttagttagtttttttttgtttttaggaaagtttggattatgttttaagataagtaaaatgttttaaaagtaagttgttttattttgaatttttttttaaatgttgattagtgtattagatttattttaatttggaaagtgaagtgttatttatttgaattttttaaaaatgttaattttaatatttaaagagttaattaagaaaagtttagtaatatgatgtattaagttgaatatgttgttatttttatttagaatagaaaattggtatttttatgttttatttattttaaggtaggttaaaaaattgtatttttatgattatttatatattttttgaatttattattgtaaagttgatttatagttaaataattaaatgtttaaattaagattaagatattagagaatgatttatttgttgttttttaattgtagt

SEQ ID NO: 291 - DNA, 5987 bp, Artificial Sequence
  chemically treated genomic DNA (Homo sapiens)
gttgtaattaaaggatagtaaataaattattttttagtgttttaattttaatttaaatatttaattgtttgattatgaattaattttataataataaatttaagaaatatataggtagttatggaaatataattttttaatttgttttagaatggataaaatgtagaaatattaattttttattttaaataaggataatagtatatttaatttggtatattatgttattaagttttttttagttaattttttagatgttaaaattagtatttttaagaagtttaaataagtagtattttattttttaaattaaaatggatttagtatattaattaatatttagggaaaaatttaaagtaaaatagtttatttttaagatattttgtttattttaaaatataatttgggtttttttgggagtaggaaagaattgattagaatatttaaaataattttttttatttaataaaaaggttttaaatataaataatttatatatattgattagattttgttttattataatgataatttgtaaattagtattatttatttttatttaggaggtgagagtgttttagattggttaagtaattggtttataatgattagtgtttgtgggaaagttggaatatttatggagtttttttgaattttagtggtttaagtttttttttaagttatgtagtttttttatttggagagaagttggagtattgggatagatttaggaggttagagtggaaattttgtttgggtgtgtggaattggagtttttggtgtgtggtgttaggtatttatttgtatggttgagtgttaggattgtgtatagtagtagggtgtgggtgagtattgtagtggtgggtagggtgtggtgtgggggtaggttttgttgtttgagggtgtttggttgtggagttgaaggaggtgttgttgaggagtttttggatgtgtttttgatgtttattgtaagttgtatgataattggttgttaattgagagaatttttttttttataagattgaaaattaagtttatgtgatgaaatgattgtttttttttgtttttttgtattttttataaattttttttttttttttttttaaaaaaattgtgtaagtttggtgggggtagggttttttatttatggaaatgagaaaattggaaatttaggaagttgttttaatttgggagtagagggggtagtttttatttttttgtttgattttttttttttttttttgagttttattgttttaggtgtataggtttttgttagatgtttttttttttttgtagtttttgtttgagtgtttttgagagttagttttggattgattgttttggatgggatattgggggagggtagaaggatatttggttttttttttaggaatttgagtggttttgaggtttgggggtgtagggaatttttttttttgttgttgttgttgtgtttggtttgtatgtttttagagggttgaggaagttatgttgggatagattggggtgagtaaggttaagaaaggttgatatgttttatgttttagtgatgatgtttaataggttgtatatttgttttatatgtagtatatatatatatagttttttaaaaaatttttattttgtggaatgaaatagttatttttagtgtatatagttgtaatttatttttgtagttaagttgtttttaatagaagaaatattgttttttgtatttttattttttttttgttttttggaaagagaggtgggaaaggtaaattttttttataatattggttttaagtagttattttgtaaatagttaatgtgagttttatgggttattaatataaagttttttgttttttgatggataaaggaagtggtgatggttagaatttgtagggatgttaaatgtttaaaatgtatgttttaaggtatttttttttttgatgtgtggattattttggttattagttttttataggagatattggtaaaataaatttgagttttaaagtttatttttttgttttttttgtttatttttttaagattatgagttgtgattatggattaaagtataatatagtatttattttttagttgtttgggtttattggggttaattttttatttttgttttggaatatagttggatgaggaattaattagatggaagggagattttgatagttggaattttatttttgtttttgtttaatatttattatgggtagtgtttagggaggagtatgtgagggtgagatattaaaaaatatatatatgtatatgtgtgtgtgtatatatatatatatatatatatatatattagaaaagaagtggaaaatagaaaatttagttatgttttaagtttttagtattataggaaaatgatagtataaaatttgaaataaaattatattaggtattttaatttgtagaagttttataagaaaaaaataaataagagatttatttggaggttttttttttaattgttttgtttagtgtatatatttgattttttatgagatatggatgattaaaattttattttatttaggaagtttttttttttttttagttatattttattattttatttatggtatttttatttattgtatggaattttatatgaaattttaattaagagtgtggattattttttttttgataatttaataattttaattttttgttttattttaaaggagtaggttgtatttattgaaatttgaagtttatagttagagttattaatgttagtttgggttagaagttatgttagaatttatattgtgagagagtattaaaattttatattataattttgaatttattttgaagtgattattattattgttttttttattagatattaattgttttgttgtttgaaaagagatttggatataaaagtgagggaaaaatagggtataaggaataattatatttagattattttaaatttaaaggaattgaattttatttattttatagtggaaattttgttatttatatagtaggatagagtgaagagttttatgtatttggaaagttaaaaaaaaaagtttaaggagaatttgggattttaaggatgggtagagttttagaaagaagtgtaaatttgagtataaggaaaaaagttatataatttattaaataattgataattttgagataataaaataaaatggataggtatatttgggatgttggttatgggagtgtattaaatgtgttaaattaaattaagattattaaatttgttttatatggaaaagtattgtgattattgtgtattataaaaaaaaggtttgattatgtaaaatttatagtttttatgtttgtatatatttaatgtttttgtgtttattttaggtaaatatatggatttgttgtataaaatttttattagtgtttgaaatttgttgggaaataatttatatgaaaagaaaataaggaagaattttaaaaattttttagagttttttgttgagttttattgtttttttttgttgtttgaaattttgttaattttttttttaagatgttaggaagattgttagatagattttgtgtttaattttataatgttttaaatatttatatgttgtattgtttattttagatttgttttatgaatatgttgaaaagaaatgaaatatttattaattgaagtgataagttatttatgtgagttaaaagaaaatgaataataaagatttttaatgtttaaaattttaaataaattaattttttttttttttttttgtattttgagtagggttttattatttatatatatagatttattattttaggtaagggttttttttttattttttttgttttttttttggtgggtttagtggtttatttagagagtggagattattttttgtttttttttttttatggtatgttggttgaaaaaagagttttgtgttagggttatttttagtatattttggtaaggttatgttatgaagtttattttttttttgagtagtagaaatgttatttatagaagatttttatgttagttttttagtaaagtttgattatttatttatttttagttatataagaagttttgaggttataaatgaaagtatataatttgttaaattaagaaaagtttttttatataagttaatgaagaaatatttaaaaaatttatttttaagttttataaaatattgatttttttttttttttttaaatattttaattttttgatggattttttttttattttatttttttttgtgattgtttattataatatttagatgagttaaagtagttgaatgagttgaatatagtttttgtattggatttagaaattttataaggggataaggaagggaaagagagtgtgaggtgggggtattggagtaggtaggatgtgaatatatttatgtatagaatatgaggtttaggatttttagtttttgatttggtatgttagggaggagtttggaaattgttattttattttaaaaataagtaaaaatttaagtaaattgaaaaattaatatttttagaattgttagagaagtgaggtgataggttataattttatttaaaaaatttgaaagatagattatataagaagaataatttattggagtagaaatgtataggtagaaatttttatgaaaattagtatttgggtaggaaaatttgaattgtaattgatgaatttttggaggtttagtgtagataagtttgtaaaggaaaaattttggaagatttttatatttttgtgagttttgttttttggagttttatgaggtttttgtagtgaatattagagaaaatttttttttagttttattagagtatagtgtttttaataaggtttatatttaagagaaattattttataatattagagtttaaattgttgggatttttgttgtagtttaattgaattagaagaaggaaaatatttaaatttaattgtttttagttttttatataggggaagaaaaatatttaattttagttttttttttagtttttatattggagaagggaaatatttaattttagtttttttttagtgattttgttttatttaaggataggaaaagagtggaatgaaaagtatttgttgaaagttattgtttataggtataggtttattaaaaggttgagatttgttataggattatagaatgttttattttttttgaatttttattgttatattataatgtattgagttttttttatttagtatattatgtttggtttttaataaaaaattagaagttatattaaaagataaaaatatagtttgataagatagagtaagtattagaattaatgttaaatatggtagagatgttgaaattataatatttatgaaattaaaataattgtaattattatgataagataatatataagaataggttggtaatgtaagtagatagatggtaattttaagaaataattagagaaatgttagagattaaaaatattggaatagaagttaataatgtttgtaagggtttattagtagattggatatggtagaggaaagaatttttgtgattgtagatatataaatagagatttttaaaattgagaattaaagaaaaaaatatagaagaaaattaaaatataatatttaagaaatatggggtaattataaaaggtgtaatatatagagaaggaaagaagggaaggagaagagagaaaggaatagaagtaattttttaagtaataatgataagaattatatttgatttttttttagatattatataaagaagaaaagagtggaatgaaatattttattttgaggggaaaaaatttataatttagaattttgtattttataaaattattttttaaaagtgaaggagaaataaggtttttttagataaatgaaaattgaggtattttgtggttagtagatttgttttgtgagaaatgttaaaagaagttattgagataagaaaaatgatataggttagaaa

SEQ ID NO: 292 - DNA, 5683 bp, Artificial Sequence
  chemically treated genomic DNA (Homo sapiens)
atggtaaatatttgaaaaagtttttatgttgaaatttaaattagattatatttaggatgttttataaggtggtattttttattaagatgataaaggataaatattggtggagttagagaggttgtttttaaatatagttttttttattagtaatattgtagtagtttgtatttattgtttagagtatgaaaaagatttttgttaaagatggtttttggggatttattattattatatgttaagagtttgttttttatgtttttatttttttattttgttaattttttttatttttattttttggtttagtgtgagattttattattttttttttttatttttttttttttatatttttggttttttagtaggttaatgtttttgtttttttattggaatttatttattttggttatttttttttttatgaatttgttggattatattttaaagttatttaaaagagggatataaagatataataaaattggaaataatgtttatttttattagtttgtagttaagagtgtgtggaattagggtggttgtaggtaaagagatagggggaagggttgttttatgttatgggtaggatagtaaatggtgtaaattttttggaaagtattttagtaatataggtgaagagtttttataatgtgtttattttatgatttatttttattttttttattttaaaggaataagaagaggtttaattaaagtatgagtgaaaaggttatttaaatatagggaaaggggttgttatgatgtttatggttttaagaaatagaaaataataatttggtttaaataataagtatataattaaagaaatttagaagtaggatttttttaagagttgagagatttagtagtttaaaaatgtgatttgatatatgagttttttttatgtttttgtttttttttttttaatattggttttatattaaatttggttttttagtggttaatagtattaaatagtatttattggtatttttgttggtatttaaaagagatggagaaagtttgattttatatggtttttttttaaaagtaataaaggattttttttggaagtttttagtaaattttgttagatttgaattatatgttaatttttaaattagttattggtagggaagtgggaaaaaggggaggaggtgtttatttttaattaatatgtttatttttgtttattgagattaattttataaaagtattgttttagttttttgaagaggagtataatgtttgtgagttatttattatatttatttattaagagttaagggataattgagtaaaatggtagagttggtaggaaaatggtgagtagttttgtttttttgtgttataattgatttgtatataaagagatttggaaatttaaatataagaattttttttttttaagtttagggttttgggtattttaagtttggtttttgtttgggtatagtggtttatgtttgtaattttagtaatttgggaagttaaggagggtggattatttgaggtgatgagtttgagattagtttggttaatatggtgaaattttaattttattaaaaaatataaaaattagttggatgtagtggtatatgtttggaattttagttatttaggaggttgaggtaggaaaattgtttgaatttgggaggtaaaagttgtagtgagttgagattgtattattgtattttagtttgggagatagagtaagattttattttattttttattaaaaaaaaattttggtttttatatgtgaaaaaataaaagttaatttttaaaaattaaataataaagagtgttaggtgataagttttatgatagagataatgtgtgttttaaaatatatagtataaaatagatggaaaatattttatggagaagggagagtttgaattggtgtttgattgaaggataagaaaaatttgttggtaatttttttttggttttgatttttgatgtagttaaagtaaagtaatttagaattatgatttagggaatatatttagagagaaatgaatttatgatgtttttaatttgaagatgttatgattttagattattttagaatataatgattttttattgttttatatttgtaagaaatgttttattattgaaaatttgtaatatttaaaaaatttttatataaaattatagtttattttgttgttttatgttaaataaataaaatatttttttttaattatgttgttttttttaattatatgtaattttaaaattagttgtaattgatagttttttttttatatttattgttaatgtatttaggttaattttatttttaattagagaaatttagaaaaaggaaattttatggtgaaatgttatatgttttataatttttagtaattaatttttaaggatgataatttggtaaaaaagagaattggattagttttttgaaaggtttattattttggtttatgttaattgattgttttaaaattatagtgtttttaggttgtagagatatatttaaaatggattattgtttttatattaaaggggataggtttttttttttttttttttatttttgttttttttaaagttgtatagaggtatatgaggtttggggaatatttgtagtatatgttggttggtaagaatgtgggtgaatttttgttaaggggtgtagatatttttttttttatgattttttttttttatttagaataattgaagtattatgataagaggaagggttttgtgtttgagataagtagtttttatatttgttagttttttttaataagaaagtttttttttgttattgtataggttatttttttattggtaaagtatgatgaagtttggaaattgttgtttttgttttgttgaaagaagttaagttttaagaaatttgtagaggtatttttataattttttagttatggtagtatgaattttgaaggggtagtgagtgttggtttttattttgtttgtatagttaagtttaggggagataatttttttatataagatgtattttgtttttgtgggttttttgtagtttttaagtttttatttgatttgtatataatgatttagtgggttagaggagtttagagttatgagtggtttatttttttaagaattatttttgattgtttagtattatggagtaagtggaaagaagaaaaaaaaaatttaattattttttgaagagtaagatgaatgttgtagaaggagaaggaaggggagggagatggatgggtgttgattttagaatttttagatttgtttggatgaattattatttatgatttgtgggataagaatttgattttatttattaattagtagaaatttttttttttgttttttaatatttgaaatttaataaatatgtgttttaggaatatattggttattttttagaggtattttatatatatattgagtaattagaaaatattttttttgtaatatatatatatatatatatatatatatattattttgttatataatatttttatgtaagaaaagtgaaattgttgtttgatgaatgtaaatatttggttgtttgtagtagttgggagttttgttaggtttaagtgttaagatgggaggtgaattttaggggtttttttttgtttgtgttgagatttttatttggttaagtttttatttatgttttggttttggagtgagtttgatagtgttggattatagtagagggagtgaggtggttgatgttttattttgaagagatgaatggaattttaggaagttagagttatgttggtttgggatagtggtttggagattagattttaatgatagaagtattaggtagtggtatttatggtaatgtgtgtatttatagaaatgtaatttatattttgggtttaggagttgaaaaatgaaaagaatgtttagggaggaaaaagggaaatataataataggtagagagtaatttattattttatgggtttgttttgtaaatagttgaagattttggagttagatggttttgtaaattttttaaataggagttatgttaagaagtatgagtgggtataaaaattgttttttaagatataattttaatttggtttgtggaaattggatatgagtaagtttttttaaaatttgagtagaaagtagttgttttttttgggttttttgatgagaatatgtatattgtttttaagtggttggttgagggagtgttgtggtagtgggagaggtgtttttgtgggttttttggtagttgtggtaggaaagggtttgaaggtagtgaaggtgaatgtggtgtattaatttgttggttttgttgatgttgtgtttatttttttttggggtgggtgtggggttagtttaggataggtgtttgggggatgtgtgtttttattttatggggatggtggaggagagttagtgagggtttgaggggtaggtattttaatgaatggtttttttggtgttttttgtgttttgttggtttatttttttttttataaaatgggtttagtttttagtatttattttttgttattaattaggtattttgggagattagtttgtttgaaagtttttgtgttattttgtgggtttttttaggtggtttttttagttttgtttttttttgggatgtttgttgattattttgagtttgtgtggtgtaagagtatgagtgttgagtttgtgtgtgttaaggttgtgtgggtgggtattgatttttttgagaagttttagtgtttttaagttttgatttttgttttttttattttttagttggaaagttgtgtgttaggtagtggggggtggagagaggagtttagattggtttttattttttgttttttgtttggttgttgtttattggttggaggaatttttaggaatgtgagtgtttttttaaaagtgtgtggtttttttgttttgttagttgttgtgtttgagttggtttgtgagtttagggtttttgttgttttttaggagtaatttttattttggatgtataggtattttttgtgtttttttagtttttgttgtttttgttattgtttttggttgttgtgttttggtatatataggtaagttgtttttggtggttgttgaggattaaagttgtttgggatatttatttggagtgttgaggttttagtttttttggtggattttggaatttatattttttttgtttgtttattttagtttgttttttttagttgttggaggattttttagggtaaggttttagagttattttttttagttttgaggtttataaattaatttattaggatattttaagatttttttattttttgaagttttttttaagtttttgtattagtattttagggaagagtttgtattttttttgttttttttgtaattttaaattatagtttttgattttgtttatttttgattttttaaaagtttttaaattgttggttttgtgttttttatattttaaaattagtattttttttttttattttttttttttttttttttttttttttttatgttttttggaaagtaattttgttgttttttattttagtaaatgtggggttaaagagggatggttttggttttgtttttatgtttagttttgtttttgtgtattgtttttttttgtttagttgatttttgatttttggtttttgtgttttttgttatagg

SEQ ID NO: 293 - DNA, 5683 bp, Artificial Sequence
  chemically treated genomic DNA (Homo sapiens)
tttgtagtaggaagtataagagttgagggttagagattagttaggtagggagggatggtgtgtagaaatggggttgggtatggggatagggttgggattatttttttttgattttgtgtttgttgaaatgaaggataataggattattttttagagagtatgagagagagagagagagagagagagagaggtggaggaaagagatgttggttttaaagtgtggggggtgtaagattaataatttgggggtttttgggaagttgaaggtgagtaagattaggaattgtagtttggggttgtagggagggtaggggaagtatagatttttttttggagtgttgatataaaggtttaaggaggattttagagagtaaggaaattttggggtgttttgatgagttggtttgtgaattttaaggttggagaggatggttttggagttttgttttgaagagttttttagtggttgagaggagtgggttggggtaggtgagtggggagagtgtaggttttggggtttattagagggattgaagttttagtgttttaggtggatgttttgggtagttttggtttttggtggttgttgggggtgatttatttgtgtgtattggagtgtggtggttgggagtggtggtgagggtggtgagggttggaggggtgtggggaatgtttgtgtgtttggagtagaggttgtttttggagagtgataggagttttgaatttgtaggttagtttgggtgtagtggttggtaaggtggaggagttgtgtgtttttaaaggggtgtttgtatttttggggatttttttggttaatgggtggtggttgggtaggaagtgggaggtgggggttagtttgggtttttttttttgttttttgttgtttggtgtgtaattttttagttagaaagtgaagggggtgggggttggggtttgggagtattagaattttttagaaaagttggtgtttgtttatgtagttttggtgtgtatgggtttggtgtttgtatttttgtgttatgtgggtttggggtgattagtaagtattttgaaaagggatggggttggggagattatttaggagggtttgtggggtggtgtaggggtttttgggtgagttgattttttggaatgtttggttgatggtgagaggtggatattagagattgggtttgttttgtaaaaagaaaaatgggttgatggggtgtaggggatattaagagagttatttgttaaagtatttgttttttgggtttttgttgatttttttttattgtttttgtggggtgaggatatgtgttttttgagtgtttgttttgagttggttttatgtttgttttggagggaggtgagtgtggtgttggtggggttggtaggttggtgtgttgtgtttgtttttgttgtttttgggtttttttttgttgtggttgttagggggtttatagagatgttttttttgttgttgtggtgtttttttggttggttgtttgggggtggtgtgtgtatttttattaaggggtttggggaggatagttgttttttatttgaattttaaggaaatttatttgtatttagtttttataagttaaattgaaattgtgttttgaaaaatagtttttgtgtttatttgtgttttttaatgtgatttttgtttggagaatttgtagaattatttggttttagagtttttagttatttatagagtagatttatagagtaataaattattttttgtttattattgtattttttttttttttttttaaatgttttttttattttttggtttttgaatttgaggtgtgggttatatttttgtgggtgtatatattgttatgagtgttgttgtttagtgtttttgttattgaagtttggtttttaagttattgttttaagttagtatgattttagttttttggaattttatttatttttttgggatgggatgttagttgttttgttttttttgttgtgatttagtgttattgggtttgttttgaggttagggtataggtagaagtttgattaaataaggattttagtatgggtagggggaaatttttggggtttattttttattttagtatttaaatttggtaggatttttgattgttgtaaatagttaagtgtttatatttattaaatagtagttttgttttttttgtgtgggagtgttgtatgataagatggtgtgtgtgtgtgtgtgtgtgtgtgtgtattatggaaagagtgttttttagttatttaatatgtatataaaatgtttttaaaagatgattggtatgtttttaaggtatatgtttgttggattttagatgttgggaggtagaaagaaaagtttttattggttgatgaataaaattagatttttgttttgtaaattataggtaatgatttatttaagtagatttgaagattttggaattggtatttatttatttttttttttttttttttttttttatagtatttattttgttttttgaaaagtaattgggtttttttttttttttttttatttgttttatgatattggatagttagaaatagtttttggagggatgggttgtttatggttttgggtttttttggtttattggattattgtgtataaattagatgggggtttgagggttgtaagaggtttataaaagtagaatgtattttgtatgaaaagattattttttttaggtttagttgtgtagatagagtagaaattagtatttattgtttttttaggatttatgttgttatggttgagggattgtaggaatgtttttgtagattttttggaatttggttttttttaataaaataaggataatagtttttaaattttattatgttttattaataagaaggtgatttatatggtggtaggaaagagtttttttattagagaaagttgataggtataggagttgtttattttaaatataaagtttttttttttattatgatattttagttgttttgggtggaaaggaaaggttatagaagagggagtgtttgtgttttttaataggaatttatttatatttttgttagttaatatgtgttgtaaatattttttaaattttatatatttttgtgtagttttgagagaagtagggatgggaaaagggaaaagaaaatttattttttttaatgtgagggtaatagtttattttgagtgtgtttttataatttggaagtattgtgattttaaggtaattaattaatatgggttgaagtgatggattttttagggagttggtttagtttttttttttgttaagttgttatttttgaggattagttattgaaaattgtaaggtatatggtattttattgtaggattttttttttttaagtttttttaattggaggtgggattgatttaaatatattggtagtaagtgtgaggaaagggttgttagttatagttagttttaaaattgtgtgtaattaaggagagtaatataattgagaaaaaatattttgtttatttagtatagaatagtaaggtgggttgtgattttgtgtaggaattttttaagtgttgtaaatttttagtagtggaatattttttataagtgtgaagtaatgaaaaattattgtattttagaatagtttaaaattatagtatttttaaattgaagatattataaatttatttttttttgaatatgttttttagattataattttaagttgttttattttaattgtattagaggttagagttaggaggaagttattaatagattttttttgttttttaattaaatattaatttaagtttttttttttttatgaggtgttttttatttgttttatgttgtgtgttttaaagtatatattatttttattataaaatttattatttaatattttttattatttagtttttaaaaattagtttttatttttttatatgtaaagattagaatttttttttggtggggggtgggatggagttttgttttgttttttaggttggagtgtagtggtataattttagtttattgtaatttttgttttttagatttaagtgatttttttgttttagttttttgagtagttgggattttaggtgtgtgttattatatttaattaatttttgtattttttagtagagttggggttttgttatgttggttaggttggttttaaatttattattttaggtgatttattttttttggttttttaaattgttgagattataggtgtgagttattgtgtttaggtaaggattagatttgaagtgtttaaagttttgggtttgggaagagagagtttttatgtttaaatttttaaatttttttgtgtataagttaattatggtatagaaggatgggattatttattatttttttattagttttattattttatttagttattttttagtttttggtgggtaaatgtggtgagtgatttataaatattgtatttttttttaaagaattgaagtaatatttttatggaattgattttagtgggtaggggtaggtatattggttaagggtaaatattttttttttttttttttatttttttgttagtgattgatttaggaattggtatgtgatttaaatttgatgaggtttgttgaaggtttttgggaaaagttttttgttgtttttaaggaagagttatgtgaaattaggttttttttattttttttggatattaataagaatgttgataagtgttgtttggtgttattggttattggggagttaagtttagtgtgaaattagtgttggaggaggaagaataaaagtatagaaagaatttgtatgttaggttatatttttgagttgttaaattttttaatttttaagggaattttatttttagatttttttggttatgtgtttattatttaagttaagttgttgttttttattttttagaattgtagatattataatggtttttttttttgtgtttggatggtttttttatttatgttttgattaaatttttttttatttttttagaataagagaagtaaggataggttataggataaatatattgtaaaggttttttatttatattattaagatgttttttagaaaatttgtattatttattgttttgtttatggtatgaggtagtttttttttttatttttttgtttgtagttattttagttttatatatttttaattgtaggttggtaagggtgagtgttatttttgattttattgtgtttttgtattttttttttgggtaattttgagatgtagtttagtaggtttataaagaaaagaataattaggatggatggattttagtgaaggggtaggggtattgatttgttaggaaattaagggtatggaggaaagaagatgggaaaaggagatggtgaggttttatattgggttgaaagatggaaatggggaagattagtaaggtaggaaggtgaggatatggagaataggtttttaatatgtaataatgataaatttttaaaagttgtttttggtaaaagttttttttatattttggatgataggtgtaggttattgtagtgttgttgatggggaggattgtatttgggagtagtttttttggttttattaatgtttattttttattattttagtaaaaaatgttattttatggggtattttaaatatggtttggtttgggttttagtgtggaagtttttttaagtgtttgttat

SEQ ID NO: 294 - DNA, 7833 bp, Artificial Sequence
  chemically treated genomic DNA (Homo sapiens)
gtttttggtgagatatgtgttttataagttttaatggagaaaaatgtaagtattttattttttgaaatttggttatttgagtaatgagaaaatagttattttttttaggatagtggtttttaattatggttatgtgtttttttaggaaaattttaaaaatatatatatattaatgtttttgtgttatttttagggattttaagtttttgaatatgaattttgtattagtattttttaattatttaggtgattgtgatgtgaaattatgattgagttttattgttttaagatgaaataaattttttttagtattgaaattataaatttaaattattaaaattaattaagggtatgggaattaataaggtatagggaagtttttatattataaaattatttttttaaattatagtttattgtttatatgttatttgttattgtagaaaagggtgaaaaaatagtaaatttaattatttttagtttgaaaaattatttagaaatgaagatgatgattttgaaatattgttaatattatttgatttataaataatgttttaatatatttattatatattgatagatatttttttatatgaatattatatattaaaattaaggtaataatgtatttagaatattttatttatatttatgtattttaagtaggttagaaattaagatatgagttattaagtatgagatgttaaggtgtggggttagaaattatattgtattttattattaataattaatatatattttaatattatatatatttaattttaatttgtatatttttaattatttttaattatgtgtataaatataagtatatatatttttatgtatttatttatttatatttttatttatttatttatataggggatttttttaaatttattattattaaattatatatttttattttaatttttagaataagtttaggaggtaggtattgttattatttatattttataaatgaggaaattgtttatagttataaagttattgtgttagatatattagaagtttaatatatatttggtgaatatatgtataaaaatagagagatagatatgtataatagtttatttttatattgagtaaaagtttttaatttgttttagaaatttttttgtgaaaattgagtaaaaattgaggtatttttttatttgttatataggtataggtggtattttatttttttaataaggatgaatattgaaatgtggattttaaggtttaattttagattttttgaatttttgatagtgggatttggaatttgtttattgttttaaagttttttaaggaatttatatgattaattaggtttagaaattattggattttattgttgaagtttgagaattaaagtttgggttttattgtggttttatagaaagggtaaatgaagtattatggatagaattgatatgtttttagttagtttttttttttagaagttaataggtagtaatatagtagaaattagtgatttatgttttgtgttttgaagttaggtagaattttatagagttttagtagtgttattgatgagatttgttttttggggtaagttgtttgatgtttttaaagttatattttttttatataaaatgagataatattttttgttttataggggtgttttaaagattaaataaaaataatatgttttattttatatggtataatgtttgatatttaagaagtaaaggatatattttatttttattgaagtaattagaaagtatgaaattatgaaggagataagagttttgattggtagtgtattttatttttttaggtttatttatttattttaaattatttttgttggagaataatttttaagttttttatttaagttgtgagtaattttatattttataatgatgttttttttatgagaaaaaaaaatgtttttaagttttttggagaaaatatatttgtattatttttattgaaaaatttaataattggattttgtttttttgtattaattttagagtgtatatgttataaataaagtgttttagtttaagaagattgaaagtaaatatggtatagtattttaaaataagaattttgtaaatatatggtatgattgtgttatattattagtaattatatgatatgtaatgtaaagtatagtttatagatttaaatttaattttaataagtaaattgattttgttttgttggggaaaagttaaagtattaatttaattgttaatgtagttttgtttatttttttggtatttagtgataagtttaaataatgtatatatttttatttatatatttagtaatataattttttgtttaatgagtgatgtttttttgttatttggtggtgtttgttagttttagaatttgttttttggtggtattataatattaagtatagagtaagtgtaataaaattgtagtatttttattgaaaaggttttgttttaaattgtttaataatttaaaggatttttgtggaagtaattgtatttgttaattagttataattagtaattaatttttttggagttttaatttatttttggtaaaatgttttaggaagagtatatattattagaaagtatgttaaaaatttatttagtagaaaatttaaaaatagtttttttttgttaagaggttttttaaaattttatttatatagttaaattttgaaattttagtaggttttgttttattattataattattgtataaatatttttaaggattttgtttttagttttaagtatgatttatttttataagtttgattagttattatattagttttgttatggaaaatgatatgtttttattttttgttgtagagttgttaaattttgatttatatttatgttgttttttttgttgaaagtttgtagtgaaagaaatttttaattttttgttttgtaatattagttggtagttttatttaatgggtattttgtttttttaaagaatttagttgttttgtttagaagttgattttttgatgtttttaatgtttggtttaattgatttgttttaatggagtttttgttggtgaggagtgagatgttattgattagaatgttgggatttgttgtttaattgttaggagtgagagatattgagatttagaaatttttggaggtgggaggggagagggatagttttggatggaggtggagatgtaagataaagggatggattttatataggaaaaaaaaaaagattttgttgaggtattgaggtgttgtatgattatattttttaaaggagaagttaaaaagtaaggaagtgggaggaggttggaggttaaagtatttaaaaggattatttgggtataatttgtttttttgttggtgtttgtaaaggatagatagttttgtttttaaagtatatgaatgttttttttaagtgattgggaatggatattaattgtttgttaaatgttattaaatgtttttttaaatttaggggatatagaaagaggggtataaaaggagaatttaaatagaaaaagggaggatttggaggtttttgaaagtggggggagaagaaggaggagggataatagagaggaatagagaaggagagtggagagaagataaataaaaataaaaataggaattattgaataattatatattaaaaagaaagtttttttttatggggtatttaaaatattgagattgtaatagtgattttggttatggaagaaagatgtttttttttatttttgtttttgaaagtttttggttttgttattggtgattaaaattttattaggttaaagagtgtgtttaattgtttgaagaatgtagtagatggaaggtgggttttgttatgttgtttgttttttttgttggagagaatgaaagaaatgtgtagagttagagatttttgttgagttagatttttttttgttgttttaggttattggttatttggtaaagatttgagtaaggaatgtagggttattgtttgggttaataaatggagtttgtttttttttttttggatgttgttgtttggttgatgtttttggtaatttatttgtggtgtatgtagaggagttttttttttttttttagattatttgttttgattaatttgattttttaaatatatttgattgtattttttaggtggatatattaataggttatgggttggagaggagtgggtgatgaggagagggatttaaatttgtgaatgtttgggttgggttggagttgtggggggtttgggaggagagaggggagaagagagaaggaaggagagtgtttgttgggatggttgagttgttttggtgagtagttttggggttgtatgtttttgtgggagatgttgttgttgtttttaggttggtaagagtggttttaatattattgttttttatttttttttttgtaaatttttagagaaatgtttttggtttttttgttgtgatatttttagtttgtatttttttatagtttaggtggtgtgtttttgtatgttggagtgttggttgttagtaggatgtttttttttgtgttgatttgtttttttttgttttgttgttgttgtttttttgatatttttgtttttattatttttagtttggagagatgttatttagttgtggtttgtatttgtggtttggggttatgtgtggaagaggggtgttagtttggattttgtttttggtagggggtgttttggagtggagagtgaggtgaatggtatatgagtgtgtgggtagtttattttgaagtttgagttttttatttgagttatgttttgtttagttttatttgggttagtgtttggtgagtgagtttatttgtggtttttgtggttgttttttttttgtatttttgtatttatttgttgattttttttttttgggatttgtattttgttttattaattagagtttgattgtttttttttatgtgattttgggtgggttgaggatttgttgttttttaaatgttagagggatgtgggtggtagagtttgagaggtggttgttgggttgtggggtgttttgattttttttttattttgtttttttgggttttatttgtttgtttttggatttttgtttttttttgttttttggttttttagagttttttttttatggtagtagttttttgtgtttttggtgtagttttttagtggatgatttttttgttttggggttgagtttagtttttggatgttgttgaaatttttgagattatgtgtgggtttggttgttgtttttttgttgggtgttattgttattgttgttgtttttgttgttgttgtttgtgggatgtttagtagtttgttgtttggtttttgtgattttgtgttttttggaagttgtttgttgttgtagagttgtatgaattagttatggtgttgtgggagtttttgtggtagtgtagtagttggatattttgtgagggtttttgttggttgttgttgttgtttgttatgttatttattgtagtttgtttggtgaagtttgttgttttttttatttttttaagtgattgttaaatgtttattggttggaattgttttggtaagtttagaatttttgtttttgattttttaattttgtagaagaatatgtgtatttagtatagattagtttattttagtgtgtttttttagttttttattttttattgttttagatttttaatattatttatttttatttagagaaataaggggaattgttgtaggtttgggggtgaggggtggttttgggatgggtagaaagtgtaggtgtagtaggaaatttttgtatgtttgtgtttatattggagttgtgaggattttgagaaatattaaatgggatggttttttgggtttattgttttgaaagagtattaattttaggggaaatattgaaatagaagttttgttattattaaagaaaaaagttttattaggatgaggaagaaataattttatgagaaagaatgagtgagaaagtaataaattaaatggtgattgtaggggaattgttgatttttggtaaaggtgttatgaggttgtattggttttttgttgaagattaggttatatagattttagaggagttgggttttaatagaatttttttttttttttttttttttttttttttttttttttttttttttttatttatttattttttttttttttttattttttttttttttaggtggtaaaagatattggttttgtagtttagatatgtttttttttttgtttttttaagttttaaggtagtataggggagttgagaaaaagaatattttgtgggttttttaggttggagtgggtatgattgaggttggttaggttttatgtaggtgagttgagggtggaattgattttagtgggtgttgatttttttatttttggataggtttttgtggagtgggttaggtattttttttgtttgtttgggtttttttagattttgatggtgaatgtttggtaggttttgttttgttgaagttttttaattaaatagggttagaggatgggagttgttgtatttttagttggtatagtatttggtttgatagtttgtagtatagggtgtatgtaattttttattttttgtgaatataattttgttgtagttaaatttggttttgaataaagtgttttttaaagatgtatataagttgaagtgtatgtaattttagagaggagggaatgattaattgtaatttagggtgaaagtttgtatagtttttagttattattgatgtaaatgttaaaaggaaaattattatgtattattttaatttattttttataaagataagttgagatatgtaattttattagatttgggttaatagattgtttttttttttggtagtttttaaatttggtattttaataaaatttaatatgtttttataattttttgatttatgtgtatatgtgtgttgtttttgaaagaataagttttattttgttattgtttaattattttttagatgttttattatggtaataattatgagtttgtaaaaataatttttggaaatgttgatggttttgtagtttaatatagattggtttgttttatttttagtttttgtattgttttaggaaataattaatttaaatgtgaagttgatatttgtaattaagaaattatatatttattagatattttaaaggggattgtataaattaaagagaataaattggttttgtagataggttgttaagaatttggtattttgtttttatttttgttaatttagaggtgattaatttttatttgagttaaatagattattatagaaaatattgtgtttgtttatttttattattgaggttttgttttttttttgtttggatatattttaaataaggggttgttttagttgttgaagtaaaagaataattaaagatggggaaatggtaaaagggtatttagagattattattagtttttttttaaaatgtggagttttgtggttataaatattgtttatttaatgagtaaaaaataaaaataaaaaaaaaataggaagtaaatgttaagtttttatttattattgttagtattaatgtaagttttaaaaaatagtattattagaaaaggatattaaaggagaattgattagaaaagaattgtggaaaatggaaatgaatattgattatttaattagattttgaggttattagtagatagtgattttgtagtatagttatagttgttggatttaaaatttaggataagtattttaaagttttaaagtagtgtttttttttgttaaaaatttgtaagatgttttaatgattggagtgttttttttgaatttgagg

SEQ ID NO: 295 - DNA, 7833 bp, Artificial Sequence
  chemically treated genomic DNA (Homo sapiens)
ttttaaatttaaagagaatattttagttattaaaatattttatagatttttaataaaaaaaagtattattttgaagttttaaaatatttgttttaaattttaaatttaataattatagttgtattgtaaggttattgtttattgataattttaaaatttagttaagtgattaatatttgtttttattttttataatttttttttagttaatttttttttagtatttttttttgatagtgttattttttaaagtttgtgttaatattgatagtggtgaatgaaagtttaatatttgttttttgttttttttttatttttattttttgtttattaggtggataatatttatgattataaaattttatattttggaaaagagttagtgatgatttttgaatatttttttattatttttttatttttaattgtttttttgttttaatgattgaaataattttttatttgaaatgtatttagataaagaggaaataaagttttaataataaagataaataggtatagtgttttttgtgatggtttgtttggtttaaatgaagattgattatttttaagttaataggggtggaagtggggtgttaagtttttgataatttatttgtaaaattagtttattttttttagtttatgtagttttttttaaaatatttggtaaatatgtaattttttgattgtaaatgttaattttatatttaagttagttattttttaaaataatgtaagggttaggaatgaagtaaattagtttgtgttggattataaagttattaatatttttaaaaattgtttttgtaggtttataattattattataataaagtatttaaaaagtgattaggtaatagtaaagtgaaatttatttttttaaaaataatatatatgtatgtatgaattaagaagttatagaaatatgttgagttttattaaaatgttaaatttagaaattgttaaaaaagagaataatttattgatttaaatttaatagggttgtatattttaatttgtttttgtaaaggataaattagaatgatgtataataattttttttttggtatttatattagtaataattaggaattatataggtttttattttgagttatagttggttatttttttttttttaaagttatatatattttagtttatatatatttttgaaagatattttatttagagttagatttaattatagtaaaattatatttatagaagatgaaaaattatatatattttatattataggttgttaaattgaatgttatgttagttaggagtgtagtaatttttattttttggttttatttaattaggaagttttagtagagtgaagtttgttaagtgtttgttgttagaatttgaaggaatttgagtgagtaagaagagtgtttgatttattttatagaagtttgtttagaaatggaggagttagtgtttattgaagttggttttgtttttggtttgtttatatggagtttgattagttttagttatgtttattttggtttgggagatttgtaaagtgtttttttttttaatttttttgtattattttgaagtttagggaagtaaagagaggggtatatttggattgtaaaattaatgttttttgttgtttaggagagaagggaatgagagagagagagagatagatagatagagagagagagagagagagagagagagagagagagagagagagagaaattttattgaaatttagtttttttagaatttgtgtgatttggtttttaatgggagattagtgtgattttatggtatttttgttaggaattagtgatttttttgtagttattatttgatttattgtttttttgtttatttttttttataaagttattttttttttattttagtaagatttttttttttaatgatgataaagtttttgttttagtgttttttttaggattggtgtttttttaaaatagtgaatttagaaaattattttgtttaatattttttaaaatttttgtagttttaatgtaagtgtaagtatgtaaaggttttttgttatatttgtattttttgtttattttagaattattttttatttttgggtttgtaatagttttttttgtttttttggatagaggtgggtggtattaggggtttagggtagtaggaggtgaggggttgaggaggtgtgttagggtaggttggtttgtgttggatatgtgtgtttttttgtggagttaaagggttggggatgggggttttggatttattagagtaattttagttggtgggtgtttggtagttatttaaggaggtagggaaagtagtgagttttattgggtgggttatgatgagtagtatgatgggtagtagtagtagttagtaaaagtttttgtaaagtgtttagttgttgtattgttgtggggatttttatagtattatgattagtttgtgtaattttgtagtagtaaatggtttttgaggaatataggattgtgggggttgggtagtgggttattgagtattttgtggatggtggtagtagaggtggtggtggtggtagtggtatttggtggggaagtagtagttaaatttgtgtatgattttgagagttttagtaatatttagggattgggtttagttttggagtgagagggttgtttgttgagaagttgtgttggagatgtgggaagttgttgttataaggagggagttttgggaagttggaggataggaggagatgggagtttaggggtagatgagtggagtttgaggaggtagggtggagggagagttaaggtgttttgtagtttggtagttgttttttgagttttgttgtttgtatttttttggtgtttgggaagtagtaggtttttagtttgtttggggttatgtgggaagaggtagttgggttttgattggtggagtaggatgtaggttttgggagggaggggttgatgagtaggtgtaaggatgtaaggaggaggtggttgtggaagttatagatgggtttgtttgttaggtgttggtttgagtggggttaggtggggtatggtttaaatgagaagtttgggttttagggtgggttatttgtatatttatatattatttgttttattttttgttttaggatgttttttattgaaggtggggtttggattagtgttttttttttgtgtgtgattttgggttgtgagtgtgggttgtggttgggtggtgtttttttgagttggagatggtgggggtggaggtgttagaggagtagtagtagtagggtagagaggggtgagttggtgtgggagagggtgttttgttggtgattggtgttttagtgtgtgggagtgtgttgtttaggttgtagggggatgtaggttgggaatgttgtggtggagaggttagggatgtttttttagggatttataggaaagagggtgagaggtgatggtgttagaattgtttttgttgatttggaagtaatagtagtattttttataagagtgtgtaattttaaggttgtttgttgaggtagtttagttattttggtaggtgttttttttttttttttttttttttttttttttttttaggttttttgtagttttgatttagtttaagtgtttgtaggtttgaatttttttttttattatttgtttttttttagtttgtagtttattagtgtgtttatttgggaggtgtggttagatgtgtttggaaggttagattggttgggataagtggtttgagagaaagagaaaggtttttttgtatatgttgtgggtgggttgttgggagtattggttgggtagtggtgtttgggaaggggagagtgggttttatttgttggtttaggtagtgattttgtgttttttatttgggtttttgttggatggttggtgatttggggtgatgagagaaggtttaatttggtaggagtttttggttttgtgtgttttttttattttttttagtgggaagggtaaatggtatagtgggatttgttttttgtttgttgtattttttaggtagttagatatattttttagtttaatggaattttagttgttagtaatgggattaagagtttttggggataagggtggagaggaatattttttttttatgattggggttattattgtagttttagtgttttggatgttttatagggaagagttttttttttggtgtgtgattatttagtgatttttgtttttgtttttgtttattttttttttgttttttttttttatttttttttgttatttttttttttttttttttttttgtttttaaaagtttttggattttttttttttttatttaaattttttttttgtgtttttttttttgtgttttttgaatttaggagagtatttgataatatttaataggtaattagtgtttatttttaattatttaaaagaggtatttatatattttgaaaatgggattatttattttttgtagatattagtagaaaaataaattgtatttgagtaatttttttaagtattttaatttttaatttttttttatttttttgttttttaattttttttttgagagatgtgattgtgtagtattttagtgttttaatgaaattttttttttttttttgtgtgaaatttatttttttattttatatttttgtttttgtttgagattgtttttttttttttttatttttaaagatttttgaattttagtgttttttatttttggtaattaagtagtagattttagtattttagttggtggtattttgttttttattgatgaagattttattaaaatagattaattagattagatgttggaggtattagaaaattggtttttagatagagtagttaaattttttaaggaaatagaatatttattagatagagttgttaattaatattgtaaaataaggaattagaaattttttttgttataggtttttagtagagaaggtaatataaatatagattaagatttaataattttatagtagagaatgagaatatgttattttttatagtaaggttggtgtggtaattaattaggtttatgaaaataagttatgtttgaaattaaaggtaaagtttttaaaagtgtttatgtagtaattatgataatgaaataggatttgttaggattttagagtttggttatgtaagtagaattttagagaattttttagtagaggaaaattgtttttgaattttttgttaagtaaatttttggtatattttttaataatatatgttttttttaagatgttttgttaaaagtaagttaaaattttaaaggagttaattattggttgtaattggttaataaatgtggttgtttttatagaggttttttaaattattaaatagtttgaagtaaagtttttttaatgggaatgttgtaattttgttgtatttattttgtatttagtgttatagtgttattaagaaataaattttgaaattggtaagtattattaagtggtagaagaatattatttattgagtagagaattgtattattgaatatgtaaataaaaatatatatattatttagatttgttattaggtattaaagaagtagataagattgtattagtaattggattagtgttttaatttttttttagtaaggtaaaattagtttatttattagaattaaatttaagtttatgaattgtattttgtattgtgtattatatgattgttagtaatatgatataattatattatgtatttgtaaaatttttattttaaaatattatattatatttatttttaatttttttgagttagaatattttatttgtggtatatatattttagaattgatgtagaggagtagagtttagttgttagattttttagtagaaatagtgtagatatattttttttagaaaatttaagaatattttttttttttatggaaagaatattattataaagtgtgagattatttatagtttaagtagggggtttgggagttattttttaataagaatagtttaagataaataaatgaatttgggaaaataagatatattgttaattagaatttttattttttttatgattttatattttttgattgttttaataaaggtaagatgtattttttgttttttaggtgttaggtattgtgttatgtaggatagaatatgttatttttatttaatttttaaaatatttttatgagataaagaatattattttattttatataaaaggaatatggttttgaaagtattaggtaatttgttttaagaaataaattttgttagtgatattgttgggattttgtgaaattttgtttgattttagagtataagatataagttattaatttttgttgtattgttgtttgttagtttttgagaggggaaattaattgggaatgtattagttttgtttatgatattttatttgttttttttgtggagttgtagtaaggtttaaattttaatttttaaattttggtaataagatttagtgatttttgaatttggttgattatatgaattttttgagaaattttgaaataatagataaattttaagttttattattagggatttagaaaatttggagttgggttttgggatttatattttaatatttatttttgttggagaagtaaggtattatttatatttatatgataaatgaaaggatattttgatttttgtttagtttttatagagaggtttttgagataggttaaaagtttttatttagtgtaaagatgagttgttgtatatgtttgtttttttgtttttatgtatatgtttattaaatatgtattaagtttttaatatgtttgatatagtaattttgtgattgtagataatttttttatttgtaaaatgtgagtaataataatatttgttttttgggtttgttttaaagattaaaataaaaatgtatggtttaatggtagtggatttggggggattttttatataaataagtgaatggaggtatgaataaataaatatataaagatgtgtgtatttatatttatatatataattaaaaatagttaaagatgtataaattaaagttaaatgtatgtgatattgaagtatatgttgattattgataatgaagtatagtataatttttaattttatattttaatattttatatttaataatttatattttaatttttagtttatttaagatatatagatatagatagaatgttttaaatgtattattgttttagttttaatgtataatatttatatgaaaaagtatttattagtgtgtagtaaatgtattagaatattatttataggttaaatgatattgataatgttttagagttgttatttttatttttggataattttttaaattgagagtaattaaatttgttatttttttatttttttttataatggtaaataatatataaataatgagttgtgatttaaagaaataattttataatgtaaaagtttttttatgttttattgatttttatgtttttaattaattttggtagtttaagtttgtgattttagtgttgaggaaagtttattttattttagagtagtggggtttagttatgattttatattataattatttggataattaaagaatattgatgtagagtttgtatttaaagatttggaatttttagaagtgatatagaagtattggtatatatatatttttaaagtttttttggagaaatatatagttatgattgagaattattgttttggggaaagtgattatttttttattatttaaatagttaagttttaggaggtaaaatatttatatttttttttattaaaatttgtaaaatatatattttattaaagat

SEQ ID NO: 296 - DNA, 7258 bp, Artificial Sequence
  chemically treated genomic DNA (Homo sapiens)
tttaataggaagtattaatagtttatgttttaggattttgtttttataattttgtaatattatattatgatatttaatttaatttttattaagttttgttaaaaatggattttaaattaagttgtaaatttttagtaatttggttttgtttttttttttttgatagtattattaaataaatttttttattgttgaaagtaataagtttggttttgttttatttattggttgtgttggtgatatttggggattgttattgaatagatgtatagagggagtttttataggtaggggtttttttgtttgtgttttttgggagagtatgttttgtatatttgttgtgtgatgaagattttatagttttatttagtgattagatttatagttttatttagttgtggtaagggggtttgaggtagttttaggtaagttggggtttagtgggagaagttgtagaagaattgattagaggatttaggaggttttagagttgggttgaggtagagagttttttgtgtgtttttttttttttttgtaatttggggattttttgtattggggtaggttttggtaggtgtatgggaggaagtatggagaatttataagttttttgattttttagtttagatgttgttgggttttttttgttggagattgtgttttttttaaatttttgtgagtgttgtggaagtatgtggggtttgggttgttgagtgttgtaagataggggagggagttgggtgggagagggaggggtggtgttggggtgggttttgatatagagtaggtgttgtgggttgtagtatagttggagattgtagtttggagtttgggttagggtttatttgtttttgtagtgttggtttgtgtttttttgttgtagttattggtgagtgttgtggttttgagatttttgggttggatgtgtggtggttttagtttttgagtgtttgtttgttttgttttgggttgtttgggttttttgggttttttggtggttgtatggagttaaggtgttttgttttgggtgttttttgtgggtgttgatttaggttgtttggagtttggagtttatagaggagagagatagttggggagtttggttattgtgggtattttttttgtgttgtagttgtttgtttggtttgtttttttgtttttttgttttttgttttgattttttttttttttgtagagttgttgtttagtgttttgattttgttattatgagagttttgttggtgtgtttgtttttttgtgttttggttgtgagtgattttaaagtgagtgtgtttttgttttgattgatgttgtttaaggatttttgattagtattaggggagaggaggggttgtttagggagttggggtttttggattttatttatagtagggttagattttttttaggaaatgggatagggtggtagtggaggtttgagaattatgggggttggtattggttggtaagggaggaagagggttattgggattgttttagtttgtgggtatttggtagatgaagtttaatttattttttttggttggaaattatggttttttatttgagaattagatatgaatagggtgaggtgagagggagagggaagagtgggttttgggattggggttagtttatttttattttggatttttggagtatgggatttttgatgaagtttttttttgaattttttttagggtagtaatgaattttattaagttttatgtgagtatttatttttataatagttggttgtatagataagttgggaaggttttaggggatatttttttttttgttttttgttgtagtgtgtgttattttttattatttttatttttttttgtttattttatttttgttttttttagtgaattgtgattgtttaaatggaggaatatgtgtgtttaataagtatttttttaatatttattggtgtaattgtttaaagaaatttggagggtagtattgtgaaataggtatggggatttttattgtaattgggagagaaatttggggatagggagggatgggtgggaggtaagagtaggtaggagttaggagttggaggtagggtgggtgatatttttatttttatgtgataagtataaatatatatatatgtttatgaaatagtggttatataaatgtgaggtggggttggaaggagattttgtttagttttttggtaggtttgaaatgatatttttaaaatgtttgttggtagttgggtatggtggtttatgtttgtaattttagtattttgagaggttaagtttgagtggattatttaggttaggagtttaagattagtttggataatatggtgtaattttgtttttattaaaaatgtaaaaattagtttggtatggtggtggatgtttgtagttttagttatttgggaggttgaggtaggagaattgtttgaatatgggaggttagattttagtgagttgagattatattattgtattttaattgggtgatagagtaagattttattttaaaaaaaaaaaaaaataaaagttagttggaatgttttttttttttttatatttttttatttttttgtttttttgtagataagttaaaaatttgttatgaggggaatggttatttttattgaggaaaggttagtattgatattatgggttggttttgtttgttttggaattttgttattgttttttagtaaatgtattatgtttatagatttgatgttttttagttgggtttggggaaatataattattgtaggtgaggtgggggtaataaggattaaaagttttttttatagttttttagaaattttgttattattttttttttttagagggttggttatagtataagagaagtgtggtttttggttgagttttttttgaggggaggaggtagggaaggttttttgggttggaatgatattttttatttttttgtgttgtgttaggaatttagataattggaggtgattttggtgttatgtgtaggtgggtttaaagttgtttgtttaagagtgtatggtgtatgattgtgtagatggtgagtattattgatttgttgatgataggtgggtggaaggggataaatttatatgtttttttattttattataggaggattgaggaggtggggggtgtttgagagggatgtttttttttatttgtttttttaagatatttttttgtttgttttttaggaaaaaagttttttttttttttagaagaattaaaattttagtgtggttaaaagattttgaggttttgttttaagattattgggggagaatttattattattgagaattagttttggtttgtggttatttataggaggtattgggggggttttgttatttatgtgtgtggaggtagttttatgagtttttgttgggtgattagtgttatatattgttttatgtatggttttgggttttttttttttgatttttttgttttattttaagtatattttttttttttttttagtaaagtgttttgttttattttttttttatttgtttttgtttatgtgtttatggttttggggataagttgtgttttgaggtttttagggagggaaggaagaagtggtatgattttatgggattaagttgtttgatgggtatttttttttatagtgattatttaaagaaggaggattatattgtttatttgggttgtttaaggtttaattttaatatgtaaggggagatgaagtttgaggtggaaaattttattttatataaggattatagtgttgatatgtttgtttattataatgatattggtgagggggaatgtttgtgattattgtggttataatggtttggggagagtgggatttagggagagattggagttgagttgaagttgttggtggggtaggggtggggtgagggattttgaagttttgatatatatgataaaggatggtagggaagagttttatgaagtttgaggggtttggtgtttttttggagagattttgaatttttttaataagtagtttttttgtgagtggaaatagttttgtgggtatatggtttgggttgggaaggttttgtttatatgaattagaaaaagatatatttttttttgtgggatgtagtttttgtttgtgttaggatatagaatttggagaatggagttttgggatggattttagtttaattattttagggggattttttagagtgtagttgggagtttttgtagaaatgatttgtatagttgtatgtagtggttttggttatttaagttttttttaatatttggaataaagtttttggggtatggggtaggggaggtttttaggtgataagtgattagtagatttttttggatgattgatttagggataggtatagttatttttttggtatttggaggggatagatggggattgtttaattagtagtgattttttttttttgattttttgtttttttttagttttgttgaagatttgttttaaggagggtaggtgtgtgtagttattttggattatatagattatttgtttgtttttgatgtataatgatttttagtttggtataagttgtgagattattggttttggaaaagagaattttagtaagtgataattgtgattgatttagaaggttttgaggagtgttttgatttgaaaatgagtttagtgtgattaagggaagattgtagagttagaggtgggagtattgaggtggtggtagatgggtttagggatggatgaagagtgttgtttagggagtgatgggttgtaaaggtaaatagatggtaggggttataggtggaggtaaatggtttagatttgtatggagagagaataatgggtttttttttgggtgatgatattttatggtgttttttttttggtgagatgttttatgtggaggtagataaattttgatgtaaatgtttttttgttttttttatttagttgattatttttatttggagtagttgaaaatgattgttgtgaagttgattttttattgggagtgttagtagttttattattatggttttgaagttattattaaaatgttgtgtgttgttgatttatagtggaaaatagatttttgttaggtgagtgttttaagtatttttttttattttttttatatttttttagagtttttgggtttgttttagttagtttaagggtgtttttttttagttaaagttttaagtagttagaattaggagtttaggtttttgagggtttaaattagtttttatgtgtttgttagatattattaaaaaaattttagttttgtgttagttattttagattgggggtatgagattttagaaagaggaaatagtaaaagataatgtaatttagtgtttagggtgtgttgtgaattataaatgattaggtgtttaggagagggaggtgagtgttaatttgagggttagggaggggaggttttaaaggaaatgtgatttgataggtatttgaagaggtagagggaagaaaggaaggtgttttagttgaaagatataaaattgagaaggaggttggtatattttgggtggggaggagaattagggtttgggagtgtggatggaatagtggtagatgatagggtttttaaagttaagtaggggattttttaattttgatgtggtagaaatggggttgtgttaggtatagtggtttatgtttgtaattttagtattgggttaggttgtagttgatggattattgaggttagagttgagattggtttggattaatatggtgaaattttgtgtttattaaaaaatgtaaaaaaaaaaattagttaggtgtggtggtgtttgtttgtaattttagttaattaggaggttgagatatggaattgtttgagtataggaggtaagtttgatgtgagttgagattatgttattgtatgttagtttgggtgatagagtgagattttgtttttttgttgaaaaaagaaagaaaatgggaagttgttaaggattttgattgggaaatttttttttttttttggtatggttgggtgatgggattagaaattttttttttatttttttagggtttattttttgtatttttggtgttatagggagatttagggggattttttgtttgttttttttaaggttgtatgattttgattggaattgtgagttggggttgtggatgtgttttgaaggataagttaggtgtttatatgagagttttatattttttattttggatttgtagttatattaaggaagagaatggtttggttttttgagggtttttagggaggaaatgggtattatttgtttttttgttggttgttatttttgtagtagagttatttttattagttgtaagaagagattgggaagataggttttgtatagatggatttgtttgtgttatttattagggtgaatgataatagttttatttttaggtataggtttgggtgttggttgtttagatttttttggttaggatggaggggtggttttgatttaatatgttattgattagtaatttgtttttttttggattgaagtttgtaggagttaaaaagggtagggtattttttgtgtatgggtgaagggagagttagtttttttgatggtgggtatttgtgaggtttatggttgagaaatgaataattttttaattaggaagtgtaatagttgaggttttttgagggagtttagttaatgtgggagtagtggtttggggagtagagatattaatgattttagggtagggttttgatattttatgaatgtattaggaaatatatatgtgtgtgtatgtttgtatatttgtgtgtgggttgtgagtgtaagtgtgagtaagagttggtgtttgattgttaagtttaaatatttttttaaattgtgtggattgtgatgttatatagagtggtttttttggagaggttataggttatttttggggttttttgggttttttatgtgatagtgtttgggaatgtatttattttgtagtatgatttgtgattagtattgttttagttttatttttatatagatgttttttttttggttagttattttttttttttagtttagtttatttaatttttattgggtggggtgaggattattttttatattgaatatttatattttattatttttatttatatttttgtaattttaaataaaagtgattaataaaatgtgatttttttgatgataaatttttttggtgtttgtatgggaaggagttggagtatataaaaaggagaaaataataaaggtgg

SEQ ID NO: 297 - DNA, 7258 bp, Artificial Sequence
  chemically treated genomic DNA (Homo sapiens)
ttatttttgttatttttttttttttatgtattttaatttttttttatataagtattagggagatttgttattagaaaaattatattttattgattatttttatttaaaattataaaaatataaataaaaatagtgaaatataaatatttagtgtaaggagtggtttttattttatttagtgaggattggatgaattaggttaaaaggaagggataattggttaagaaagggatatttatgtgaaagtgaaattgagatagtgttggttataggttatgttgtagaataagtatatttttaggtattgttatgtgggggatttaagaggttttaggagtgatttataatttttttagaaagattattttgtgtggtattatagtttatatagtttaaggaaatatttagatttaataattagatattagtttttatttatatttatatttatagtttatatataagtgtgtaaatatatatatatatatatattttttgatatatttatggaatattagagttttgttttgaagttgttagtgtttttgttttttaaattgttgtttttatattggttaagtttttttaagagattttagttgttatattttttaattgggaaattatttattttttaattatgggttttataaatgtttattgttgggggagttggttttttttttatttatgtataggagatgttttgttttttttaatttttgtaggttttagtttagaaaaagataagttgttggttagtaatatgttgagttaggattatttttttattttggttagaggggtttgggtagttagtatttaggtttatgtttgagggtaaagttattgttgtttattttggtgggtggtataggtaaatttatttgtgtagagtttatttttttagtttttttttatagttgatggagatgattttattgtaaaaatgataattagtaagaaagtgggtggtgtttgttttttttttggggatttttagagggttaggttatttttttttttggtgtgattgtggatttagggtaagaagtgtgagatttttgtgtagatgtttggtttgttttttagggtatatttatggttttagtttataattttagttaaagttatgtggttttggagggaatagatgaggggtttttttgagtttttttgtgatgttaaagatataaaagatgagttttagagaagtgaggaggggatttttgattttattatttaattatattagagagagggaagagttttttagttaaagtttttagtgattttttattttttttttttttttggtgggaggatagaattttgttttgttgtttaggttggtgtgtaatgatgtgattttagtttatgttaaatttgttttttgtgtttaagtgattttatgttttagttttttgattagttgggattataggtaggtattattatatttggttaatttttttttttgtattttttagtagatatagggttttattatgttggtttaggttggttttaattttggttttaatgatttattgattatggtttagtttaatgttgggattataggtatgagttattgtgtttgatgtagttttatttttattatattgaagttggaaaattttttgtttggttttaaaagttttgttatttgttattattttatttatatttttagattttagtttttttttttatttggaatatgttagttttttttttagttttgtattttttaattgaaatattttttttttttttttttgtttttttaaatgtttattaagttatattttttttaaagttttttttttttgatttttaggttggtatttattttttttttttgaatatttgattatttatagtttataatatattttgggtattgagttatattgttttttattgttttttttttttaggattttgtgtttttagtttgaagtgattagtgtagagttgggatttttttggtaatgtttggtaaatatataaggattggtttaaatttttaaagatttgagtttttgattttggttatttagggttttggttagagagagatatttttaagttggttggaataagtttaggagttttggggagatatggaagaggtggagagagatgtttggaatatttatttggtaggaatttgttttttattgtgggttagtagtatatagtattttggtggtgattttagagttgtagtagtggggttgttgatatttttggtgggaaattagttttataatagttatttttagttgttttggatagagatagttggttaggtggagaaaatagggaggtgtttgtattaagatttatttgtttttatgtgggatgttttgttagagaggggatattataaagtattattatttagggagaggtttattattttttttttatgtaaatttgagttatttatttttatttatagtttttattatttatttatttttgtagtttattgttttttaaataatattttttatttatttttggatttatttgttattgttttagtgtttttatttttaattttgtagtttttttttgattatattgggtttatttttaggttaaaatattttttaggattttttaagttagttgtaattgttatttattagaatttttttttttaaagttagtgattttatagtttgtgttaaattggggattgttatatattgagggtaggtagatggtttgtatagtttgggatggttgtgtatatttgttttttttggaatggatttttagtaaggttgggggaggatagagggttagaggagaaagattattattggttaggtggtttttatttgttttttttaagtgttgaggaagtagttatgtttatttttaggttagttatttagggaggtttgttggttgtttattatttggaaattttttttgttttatgttttaagggttttgttttaggtgttgaaaaaggtttggatggttagagttattgtatatagttgtataggttgtttttgtaaaaatttttagttgtattttagaggatttttttgaggtagttaggttggaatttattttaaggttttattttttaagttttatattttagtatagatagaggttgtattttataaaggaaggtgtgtttttttttaatttatataaatagggtttttttagtttaagttatatatttatagggttgtttttatttgtaagagggttatttgttggggaaatttagggtttttttagaggagtattaggttttttagattttatggaatttttttttgttattttttgttatgtatattgaggttttaaggttttttgttttatttttgttttattggtagttttaatttagttttagtttttttttgggttttattttttttaagttattatggttatagtagttgtgggtgtttttttttattaatgttgttgtggtgagtaagtgtgttagtgttgtagtttttgtgtaggatgaggttttttattttaaattttatttttttttgtgtgttggagttaagttttgagtgatttaggtagatgatgtagttttttttttttgggtaattattgtggaagaagatatttattaaatagtttagttttatgaaattatgttattttttttttttttttttagaggttttaaagtatgatttgtttttaaggttatgggtgtatggataggggtagatgagggagaaatgaggtggaatattttgttgggaaggagaaagggatgtgtttggggtggggtagaagagttgaagaggagaaatttagggttgtatatgaagtagtgtgtggtgttgattatttagtaagggtttatgaggttgtttttatatatgtaggtgatagagtttttttggtgttttttgtagatggttgtaaattagggttggtttttgatggtggtgaatttttttttaataattttaaagtggggttttagagttttttggttatattgaaattttaatttttttggaggagaggagggttttttttttggaggataaatagagggatgttttagggaggtaggtaggagaaagtattttttttgggtattttttatttttttagtttttttgtgatggaataaggggatatgtaagtttgtttttttttatttatttgttattagtaggttagtgatgtttattatttgtgtagttatgtattatgtatttttggataagtggttttaggtttatttgtatatagtattagggttgtttttggttgtttgggtttttggtataatatagaaagataggggatgttattttaatttagagggttttttttgttttttttttttagggaagatttaattagaggttgtattttttttgtgttatggttagttttttgggagaaggggatggtaataaggtttttgggaagttgtagggagggtttttggtttttgttgtttttattttatttgtagtaattatgtttttttaggtttagttgaagagtattagatttgtgggtatggtatgtttgttgaaggatagtggtagagttttagggtaggtagggttggtttatggtgttagtgttggtttttttttggtaaaagtgattattttttttatagtaggtttttgatttatttataaggggataggaggatgagagaatatgagaaagagaagaatattttaattaatttttatttttttttttttttgagatggagttttgttttgttgtttagttggagtgtagtggtgtgattttagtttattgagatttggttttttatgtttaagtaatttttttgttttagttttttaagtagttgggattataggtatttattattatgttaggttgatttttgtatttttagtagaggtagggttatattatgttgtttaggttggttttgaatttttgatttaaatgatttatttaaatttgattttttaaaatgttgggattataagtgtgagttattatgtttggttgttaatggatattttaaagatgttgttttagatttgttagaagattggatagggtttttttttaattttattttatatttgtgtggttattgttttgtgagtgtgtgtgtgtgtttatgtttgttatatagggatgaagatgttatttattttatttttagtttttaatttttgtttgtttttgttttttatttatttttttttgtttttaaattttttttttagttgtagtggagatttttatatttattttatagtgttgttttttgaatttttttgggtagttgtattagtgaatgttggagaagtatttgttggatatatatgtttttttatttagatagttatagtttgttggagagaataaaggtggggtaagtgagggggagtggaagtggtaaggggtggtgtatgttgtagtagagggtagggaggggagtgttttttgaagtttttttaatttgtttgtgtagttaattgttgtaggggtggatatttatatggaatttgatgaagtttattgttgttttggaagagatttgggaggaggttttattaaaggttttatgttttagggatttagggtgagggtaaattggttttaattttaaaatttattttttttttttttttttgttttattttgtttgtatttagtttttaaatggaagattatggtttttagttaggagaaatggattaagttttatttattagatgtttgtaggttggggtagttttggtggtttttttttttttttgttagttagtgttaatttttgtggtttttaagtttttgttgttattttgttttattttttggggagagtttggttttgttgtggatggaatttggagattttagttttttgagtagtttttttttttttttggtgttgattagaggtttttgggtagtattagttaaagtaagagtgtatttattttggagttgtttatgattaggatgtagagaagtaggtgtgttagtagggtttttatggtggtgaggttggggtgttagatggtggttttgtaaaggaaggagaagttagggtaagaggtggaggaatgggaaggtaggttaggtgggtgattgtagtgtaggggagatgtttgtggtgattaggttttttagttgttttttttttttatgggttttggattttgggtagtttggattggtatttgtgggggatgtttgggatggggtgttttgattttgtgtagttgttggggagtttagggagtttgggtagtttagggtggggtaggtagatgtttgggagttggggttgttgtgtatttggtttggggattttaggattgtggtatttattggtggttgtggtaggagggtgtgagttggtgttgtggggataggtggattttggtttgggttttgggttgtggtttttgattgtgttgtgatttgtggtgtttgttttatattagggtttgttttggtgttgttttttttttttttgtttggtttttttttttgttttgtagtgtttagtgatttggattttgtgtgtttttgtaatgtttataaagatttgggggaagtgtgatttttagtggaggggatttaatagtgtttggattgaggaattgagaggtttgtaaattttttgtgtttttttttatgtatttgttggggtttgttttagtgtaaggagtttttgaattgtagagaggagagaaggtgtataggagattttttattttagtttagttttgaagttttttgggttttttaattagtttttttgtaattttttttgttgggttttaatttgtttaagattgttttagatttttttgttgtagttggatggagttgtgagtttggttgttggatggagttgtgaagtttttattatgtgataaatgtatgagatatatttttttaagaagtatagatagaaaaatttttgtttgtaggggttttttttgtgtgtttgtttagtggtagtttttagatattattaatataattagtggatggaataaagttgggtttattgtttttggtagtaagggggtttgtttgatggtgttattagagggggaaaggtaaggttagattattgaaaatttgtagtttggtttaaagtttgtttttgatagggtttgataaggattgggttaggtgttgtgatatgatgttataggattgtgggaataaagttttagggtataaattgttggtgttttttattgaa

SEQ ID NO: 298 - DNA, 2501 bp, Artificial Sequence
  chemically treated genomic DNA (Homo sapiens)
gtaaatttttatattttgaggagagatagggttttattatgttggttaggttggttttaaatttttgattttaggtgatttatttgttttggttttttaaagtgttgggattataggtgtgagttattaagtttgatgggtagtaatttattttttatataattttttttttttttttttggtagagatgaggttttgttatgttgtttaggttggtttaaaattattgggtttaagtgatttgtttatttgggttttttaaagtgtagggattataagtatgaattattatgtttggttgtaattttttatatattttggatattaattttttattagataatatagtttgtaaattttttttttttttattttgtaggttgtttttttattgttggttattttttttgttgtatagttatttttaagtttgttgtaaatttatttgtttattttttgttttgttgtttgtgttttgttgttatatttaagaaattattgttaaatttattgttatgaagtttttttttatgtttttttttaggagtattatagttttaggttttatgtttaatttttaataagttttgtgtttttgtatatggtgtaaggtaagggtttaattttatttttttgtatgtggttatatagtttttttagtattatttgttaaagatataattttttttttatgttttggtgttttaaaaaaaaaaaaaattttggttggttatggtggtttaggtttataattttagtattttgggaggttgaggtaagtggattgtttgaggttaggagttttagattagtttggttaatatggtgaaattttgtttttattattgaagatataaaaattagttaggtgtggtggagtatgtttgtaattttagtttattagggaggttgaggtatgagaattgtttgaatttgggaggtagaggttgtagtgagttaagattttattattgtatgttagttggggtgatagagtgaggtagggttttattttgttgtttaggtaggagtttagtggtttaattatggtttattgtagtttatattgttagggtttaagttatttttttattttagttttttaagtagttaggattataggtgtgtgttattatgtttagtaaatttttgtattttttgtagagatggggtatttttatgttgtttaggttggttttgaatttttaattttaagtgatttttttatttgggttttttaaagtattgggattataggtgtgagttattgtgtttgatatggtgttttttaatttatttttattttttatttttatttttttgagataaggttttgttttgttttttaggttggaatgtagtggtataattatggtttattgtaatttttgtttttttggtttaagtgatttttttgttttaatttttggagtagtttggattatgggtatatgttataatgattagttaatttttgtttttttttttttttttttttttttttttttttttttttttttttgagatgtagtttttttatgttatttaggttggtttaaaatttttgggtttaagtgatttttttattttggttttttaaagtgttgggatgataggtgtgagttatgtggtgtttaaaaaaggtaataaaaaattttttatatattgggtatagaagtggtatgggtttttatatattgtgagatttttggtattagttataaattttgtgtatatttaagattttttagagtaggtgtaattattttgttttatagatgaggatatagaggttgagttgtagtgatttatttaaggttgtatagttagtaaatagatggaggttggattggaattgaggattttatttaagggtttttataaatttttgggggttttttgttgttttatttttattatatttgaaagaatgaatgaatgaatgttttgggtattgtgtttattttttagtaaattgtggagtttggatgagtttattgttttgtgtggggggggtgtgtgtttgttttgtgtatgtgtgttttttgggtatggttggttttgttttatttttttgtatagggtattgtttttttttgtttggtatattttttttttttttatgtttggattggggtggtagatgttgtttttgtttattgtttttttttattggtttttgtgtgaaaagttggggtgtttgtgttgttgttgttgtgtttgttgaagtttttgagatgttggtgtgtattgttttagtttgggtgtttatattggttgttttggttattttgttgtttgatgatgtttgtaggtggtaggtattatgggggggaatatggatttagggggataggtagggtgttgggtggggggttgtttttttttggggtggttggtggttgttgttgatagatgggtgtgtatgtgtggggtggtgtggtgtgtagtggtagttggtgtgggtagggtggtatttttggttgtgtgtgtttgggttg

SEQ ID NO: 299 - DNA, 2501 bp, Artificial Sequence
  chemically treated genomic DNA (Homo sapiens)
tagtttgggtatgtgtgattggaagtgttattttgtttgtgttaattgttgttgtgtgttgtattattttatgtatgtgtgtttgtttgttagtagtggttattggttattttgaggggaagtgattttttatttagtgttttgtttgtttttttgagtttgtgtttttttttatggtatttattgtttgtggatattgttgggtagtgagatggttgggatggttagtgtgggtatttgggttggggtggtatgtgttggtattttggaggttttagtagatgtggtggtggtagtgtaggtgttttggttttttgtgtggaaattgatggggaggggtgatgagtggaggtggtgtttattattttagtttgggtgtgggggaggaggggatgtattaaatggagagaggtgatattttgtgtagaaggatggaatggagttggttatgtttagggaatatgtatgtgtaaggtgggtatatattttttttatgtggagtagtgggtttgtttaagttttatggtttgttgggaggtgggtatggtgtttgaggtatttatttatttatttttttaggtgtgatggggataaagtagtgagaagtttttaagggtttgtgagagtttttgagtaaagtttttagttttaatttaatttttatttatttgttggttatatgattttaggtgggttattatggtttagtttttgtgtttttatttgtaaaatggggtaattgtatttattttagaaaattttgagtatatatagaatttgtagttagtattaagaattttatagtgtatagaggtttatgttatttttatatttagtgtgtggggggttttttgttgttttttttaagtattatgtggtttatgtttgttattttagtattttgggaggttagggtgggaggattgtttgagtttaggagttttagattagtttaggtaatatagagaaattgtattttaaaaaaaaaaaaaaagaaagaaagaaagaaagaaaaaaagaaaaataaaaattagttagttgttgtggtatgtgtttatagtttaaattattttagaggttgaggtaggaagattatttgaattggagaggtagaggttgtagtgagttatgattgtattattatattttagtttgggagatagagtaagattttgttttaaaaaaataaaaataaaaagtaagaataaattaagaagtattatgttaggtgtagtggtttatgtttgtaattttagtgttttgagaggtttaggtgggaggattgtttgaggttaggagtttaagattagtttgagtaatatagggatattttatttttataaaaaatataaagatttgttgggtatggtgatatatatttgtaattttagttatttgggaggttgaggtgggaggatggtttgaattttggtagtgtaggttgtaatgagttatgattgggttattggatttttgtttgggtgatagggtaagattttgttttattttgttattttggttggtgtgtagtggtgagattttggtttattgtaatttttgttttttaggtttaagtgatttttatgttttagtttttttagtaggttgggattataggtgtattttattatgtttggttaatttttgtatttttggtggtagagatagggttttattatgttggttaggttagtttgggatttttagttttaagtagtttatttgttttagttttttaaagtgttgggattataggtttaagttattgtaattagttagaattttttttttttttaaagtattagaatatgggggaaagattgtgtttttaataaatggtgttgagaaaattgtataattatatataaaagaatgaagttggatttttattttatattatatataaaaatataaaatttattaaagattaaatataagatttgaaattatagtgtttttagaagaaaatatggggaaaagttttatgataatggatttggtaatgattttttggatatgatagtaaaatataggtaataagataaaagatagataaatgggtttgtaataaatttaaggatagttatatagtaaaagaaatgattaatagtgaaaaggtaatttatagaatggggaaaaaaaaagtttgtaaattgtattatttggtaaagggttaatatttggaatatatgaaaaattatagttaggtatggtggtttatgtttgtgatttttgtattttgggaggtttgggtaggtagattatttgagtttggtagttttagattagtttgagtaatatggtaaaattttgtttttattaaaaaaagaagaaaaaaattatataaaaaataaattattatttgttaggtttggtggtttatgtttgtaattttagtattttgagaggttaaggtgggtggattatttgaggttaagagtttgagattagtttggttaatatggtgaaattttgtttttttttaaaatataaaaatttgt

SEQ ID NO: 300 - DNA, 6815 bp, Artificial Sequence
  chemically treated genomic DNA (Homo sapiens)
ttgtttgtgaattaaaaatttagagtttttttgtgaattatgttgttaagaattgtagatttaagttttaagattgtatgaatttaaattttgattttatggttttagttggtatgaagatataaagataattttttagtaaaaatagttttgaaagattgggtgtgatggtttatgtttataattttagtattttgggaggttgaggtgggtggattatttgtggttaggagtttaggattagtttggttaatatggtgaaattttgttttaattaaatatataaaaaaattagttgggtgtggtggtggatatttgtaattttagttatttagggaggttgaggtaggagaattgtttgaatttaggaggtagaggttgtagtgagttgagattatattagtgtattttagtttgggtgataaaagtgaaattttgttttaaaaaaaaaaaaaaatggtagaatgttatatggaaagttaatttttagagatagtaatttagatatttataatattatattgtttttttaagtatttatattaataaattaattaatatttgttgatttaatatggttagggatagtgttgggtttttataatttttaagtaattttagttagattttgtttttaaggagtttatgagtagtatgaggagataaaaaatagataaataattttaatttaggaagaatttgataaatgtatgataattattattagaatttagaggagaggaaattttttttgaatagagattaaaggaaggaataatgaatgtggtagtatttgggttggatttattataagaggtatgtttttttttgataagttaagaaagtggggatttaaggtagaagaaaagaaaagttttgagtttttggagtattaaaattttgtttggttgaagtataggttatagttggaggagatggattaggaaggattgttatgggtagagaggaagttttgaatttatgggggaagttatgatttgggttaaagatagagttgggttatgttaagatggattttgaagtagtaaaaaaaaatttaagaaagtaaataggttgtagggtttaggatgaagtttgggaggaaagggtagagtggtttttaggaggttgttaggataggtaaggtaatgggttttaaagggagtggttgaaatgtaatggaaaaagagagattgtaaagttagaaggtttaggaattgttttttgattaggtgtggaaggtaagggaaaattagtttttgaagaagatagtgagattttaatttgggtggttggagagatagtgatgttgggtatagatatggggaagttgagaggaatattatgtttgagaatggtgatttatatttgaataagtttgtaatgtttagtagattgttggaaaagtggggttggagatatatttaatggaggagttagattaatttttatttttttttatttgagagagttagtaagttatggttggaatgtgtgtgtttagtaggagagggtagggagggaagttaagagagttgggagtttgagtgaagtttttgttaaaggtagaagaggaaagttggtgtagtatagtatatttttttatttatgtttattaagtttagggataaggtttattaagatgagtttggaagagaatgttggagagaaagtggttaagaaaattgtttttattgaattttttgggttaattttgattgtaagtttttgaataattaaagtttgtgaggagatagttaatttttttattttttttatgttaatagtgaataattgtagatttttttttttttttttttttttttttttgttttttttttttttttttttgaatatttttgtttttttttgggattggtttagagtatgggtggttattgttgatttataggaggtattattgttattaataaagggtaatagtttttttttttaatatttatttatatttagtatttatttttaatattgattatggagagagtttttttgtgtttaaatattgtaatattgggggttttttaaagtataaaaatatatatttgtatgatggtattattaatatttttatggttttttattttttttttgtattggttttaagagttatttataaattttttagtaattgtatagtgttttagggttagagattggttatttttggtattgtgattagagttatttaatatttaaggtggtgattaatgtttggtaataaagtttttattgggtgttatgtgttttgggattttgagtgtgggtattttaggagtattttagtattgtgtgttagtattatggttgagagaatagttgagaaagtggttaagaggtggatttatgtgaatgttattgggaaatgagagattttgtttttaattatggttagtgtaatttgaaagtttaaaattagtttaaaataaaggtatttatttttattttatgtttatattttaggtttttaataatatgtattttttatatgtttatagaaagtagttaattgagttatttatggaaaggtttgtgggtttggttaatgaagtggaggagtattatattttagttggaaatatatttttagaatgttaaaatatttattttaaagtttggttttttggtgtaattggaggtatggtaatgtttttgtttagagattgggggttagggttagtaaggtatttgatttatatgtattttagaaggtttttattgttaaattatatttttttggaaaaattatttatgttttattttgtaaatttgatatttatatatttttgattggtattttattttagttgtaagattatgatttatagtaagtttgtttttttttttgtttggggtggtagtagaaagtatagggtattttttagtttttaagggtaggggtaaaggggttggggttttttttttttagtatagttttttttggttgtgttatattgttttttgtgagtagatagtaagtttttttttattttttattgttatttatttagtgttgtgtagtagtttagttgtgtgtttgttgggaggggttgttaagtgttttgtttattggttgttttttgaatttttgttattttatgtataaatatatttatatattttttttgtttagtttatatattgagttatttgtatatgtgagtatatttttttttttttttttatttttttggtttttgatttttataagtttatggaatatttttggaaagatgtttttgatttagtagggtaggtttgttttgatttttttttttgtagttttagtattttgagaaagtaatttatttttttggttagtgtttgtattttagtagggagatgaggattgttgttttttatgggggtatgtgtgtgtttttttttttttttaggatttgtaggattttttgtgttatttgtatataatttggtaggtttatattttttaagagttttatgaagtgttttttgtatgtgttttaaaaaggtatttgaaaattgaaagtgtgatttatggaaattaaattatttgtaaaaaattgttttggaaagtaatgattgttggttataaagggaaatatttgtgatgtatttaatgtgtttttaattttttatttgttgataatttatagttattaatgttaaatttgattttggttttagttatatttgtatattgtttaataatggtttatttttgtaagaattagataaaatgtatatttgatataaaatagttaaaaatgtaatttttagtaatagtaagtttggtatttagatagattatgaatattttgttagatattttgttgggtgtttgggatagtaattaaaataaagtattgatagttgtattagagtttattaggttgtagtaaaggaagtttatttaaaagtataaattatttaagattatagatgtatgatatattttatttattttttgtttttttaatatgtatatatatatatatatatatatatatatatatatatgtgtgtgtgtatgtgtgtgtgtatgtttaatttttaatttagttaaaaatttttttttatttgttttttatttggatatttgattttgtatattttagtttaagtgaattgagaagattgagttgtaggattaaaggatagatatgtagaaatgtattttaaaaatttgttagttggattagattgataatgtaatataattgttaaagttttggtttgtgatttgaggttatgtttggtatgaaaaggttatattttatatttagttttttgaagttttggttgtataattaatttgtggaaggtatgaatatttatgtgtgttttaattaaaggtttttttgaattattttttatatgagaatttttaatgggattaagtatagtattgtggtttaatataaatatataagttaggttgagagaattttagaaggttgtggaagggtttatttattttgggagtattttgtagaggaagaaattgaggttttggtaggttgtatttttttgatggtaaaatgtagttttttttatatgtatattttgaatttttgtttttttttttttagatgttttttgttagtttttttagttgttaaatatagttgtttgtggttggttgtgtatgtaattgtatattttattttatttgttttattttggttatagtgtagttttttttagggttattttatgtatatattatgtatttttagttaatgaggagggggaattaaatagaaagagagataaatagagatatattggagtttggtatggggtatataaggtagtatattagagaaagttggtttttggatttgttttttgtgtttattttaagtttagttttttttgggttatttttagtagatttttgtgtgtttttgttttttggttgtgaaatttagtttttatttagtagtgatgataagtaaagtaaagtttagggaagttgttttttgggattgttttaaattgagttgtgtttggagtgatgtttaagttaatgttagggtaaggtaatagtttttggttgttttttagtatttttgtaatgtatatgagtttgggagattagtatttaaagttggaggtttgggagtttaggagttggtggagggtgtttgttttgggattgtatttgtttttgttgggttgtttggttttattggatttgtaggtttttggggtagggttggggttagagtttgtgtgttggtgggatatgtgttgtgttgtttttaattttgggttgtgttttttttttaggtggtttgttggtttttgagttttttgttttgtggggatatggtttgtattttgtttgtggttatggattatgattatgattttttatattaaagtatttgggatggttttattgtattagatttaagggaatgagttggagtttttgaattgtttgtagtttaagatttttttggagtggtttttgggtgaggtgtatttggatagtagtaagtttgttgtgtataattattttgagggtgttgtttatgagtttaatgttgtggttgttgttaatgtgtaggtttatggttagattggttttttttatggttttgggtttgaggttgtggtgtttggttttaatggtttggggggtttttttttatttaatagtgtgtttttgagtttgttgatgttattgtatttgttgttgtagttgttgttttttttgtagttttatggttagtaggtgttttattatttggagaatgagtttagtggttatatggtgtgtgaggttggtttgttggtattttataggtatttgtgtttgtgttgtttgttggggtggttgttgtgtttggtaggagggagggagggagggagggagaagggagagtttagggagttgtgggagttgtgggatgtgtgatttgagggtgtgtgtagggagtttggggtgtgtggtttagtttgggggttttgtgtgtagtttgtgttgtgtttagagttaagtttttttgttgggtagttgaaaaaaatgtattttttatttatttattgtttgtgtgagaggtagatttgaaagtttgggttttttaataaaatatatgttggaaaattagataaagtagtagttatttgtgggggaaaatatttttaggtaaataaatatggggtgttttgagttatttgggaaggttttgtttttggtatttaaagttgggggtgtttggagttagtagagtttagtagagttttatttatttttttaatgtttttgtttaatgtgttttttaaatttttttttatttagattatttgattggaaatatgttagttatgatgatgattttttgggaagtgatttttgttatttgttttttttttttttttattttatgttttggggttttagagagtgattgggagttgaatgggtttgattttggagttagttggttgagtttgtgttggagtggattgttggtatgtgatttttgatagttggaaatttgtaggtgttttgtgagtttaaaataagttatatggaagtataagtgtttaaaaataattttttgttagtttagtgataagtttgttttatttggggagaatgttttggagtggtgtgtgggttagttagggtttgtgttttgtagttattgtggaaggagtgtggttggtttaggatataggagattattttgtgattttaatggtgaaggttgtgtgtttttattttaatttttttttttataagaattgttttttttttttttttttttttttttatttttttttgtttagttttttttttt

SEQ ID NO: 301 - DNA, 6815 bp, Artificial Sequence
  chemically treated genomic DNA (Homo sapiens)
aaaaggagaaattgggtaagagaaaatgggagggagaggagagggagaaagaataatttttgtagggaaaaaaattaaaatgaggatatataatttttgttattgaagttataaagtggttttttgtgttttggattggttgtgttttttttatagtggttgtgaggtgtagattttggttgatttgtatgttattttggggtattttttttgggtgggataggtttgttattgggttggtaggagattatttttaagtatttgtgtttttatatggtttgttttaaatttgtgggatatttataaatttttggttgttagaagttatatgttagtaatttgttttagtgtggatttagttagttaattttgaaattagatttatttaatttttaattgttttttaaagttttaggatgtggggtggggaggaggggaaagtgggtgataggaattgttttttagaaagttattattatagttgatatatttttaattaaatagtttagatgaaaggaaatttggggagtatattaaataaaaatattaaaaggataaataaaattttgttgagttttgttaattttaaatatttttaattttaaatgttaagagtgagatttttttaagtgatttaaagtgttttgtgtttatttgtttggaggtgtttttttttataaataattgttgttttgtttggttttttaatgtgtgttttgttaggaagtttgggtttttgggtttgttttttgtatggatggtaagtgggtggagagtatgttttttttagttgtttggtgagagaatttgattttgaatgtagtgtgggttgtatgtagaatttttgggttgggttgtgtgttttgggttttttgtgtgtatttttgggttgtgtgttttgtggtttttgtagttttttaggttttttttttttttttttttttttttttttttttgttgggtgtggtggttattttgatgggtggtgtgggtgtgggtatttgtagaatgttggtgggttggttttgtgtattgtgtagttgttgggtttgttttttaggtagtagggtatttgttggttgtggggttgtaggaaaggtgatagttgtggtggtgggtgtagtagtattagtgggtttggagatatgttgttgagtggggggaaattttttaggttgttggagttgaatgttgtagttttagatttggggttgtaggggaggttggtttgattgtagatttgtgtgttggtggtggttgtggtgttgaatttgtaggtggtgtttttggggtagttgtatatggtgggtttgttgttgtttaggtatattttgtttaggggttgttttagggggattttgagttgtggatggtttaggggttttagtttgtttttttggatttgatgtagtagggttattttagatgttttggtgtggagggttatggttatggtttgtggttgtgggtagggtgtagattgtgtttttgtagggtagaaggtttagaaattggtgggttatttggaaaaagagtatagtttgaggttagaggtgatgtagtgtatgttttgttgatatgtgagttttggttttggttttgttttgggagtttgtgggtttggtgaagttgggtgatttgatgggagtaagtgtagttttaggatgaatgttttttgttagtttttgggtttttgggtttttaattttaagtattggttttttgagtttatatgtattataaaggtgttggaggatggttagggattgttgttttgttttgatattggtttaaatattattttaggtataatttgatttggagtgattttaaagagtagtttttttgaattttattttatttgttgttgttgttggatagaggttgagttttatggttagggggtgggggtgtatgaggatttgttaaaggtggtttagggaagattgggtttaaaataaatgtgaaagatggatttaggggttggttttttttaatgtgttgttttatgtgttttgtgttagattttgatatatttttgtttgtttttttttttgtttgattttttttttttgttggttagaaatatgtagtgtgtatataggatgattttggggaggattatattgtaattgagatagggtagatagaatggggtgtgtggttgtatatgtagttagttatagatagttatatttagtagttgggggaattgatagggggtatttgaggggaagggggtggagatttagggtatatatataggaagagttgtattttgttattaggagaatgtaatttgttaggattttagtttttttttttgtaaaatgtttttaaagtagatagatttttttataattttttgagatttttttagtttgatttgtgtgtttatgttggattatagtattgtatttggttttattaggaatttttatgtgaaggatgatttagaaaaatttttggttagggtgtatatgggtgtttatgttttttataggttggttatgtaattaaaattttagaaaattgaatataaaatgtgatttttttatattaaatataattttaggttatgaattaaagttttggtaattatgttatattgttggtttggtttagttaatagatttttaaaatgtatttttgtatgtttattttttagttttataatttgatttttttggtttatttgggttaggatatgtagaattaaatatttagatgaaaaataaatagaaaaaagtttttaattgaattaaaagttaaatatgtatatgtatatatatatatatatatatgtgtatatatatatatatatatatatatatatatattaaggagataaaaaataggtgaagtatattatgtgtttataattttggatagtttatatttttgaataaattttttttgttgtagtttaatagattttgatataattattaatattttgttttaattgttattttaaatatttaatagagtatttgatgaagtgtttatggtttatttaaatgttaagtttattgttattaagagttatatttttgattattttatattaagtatatattttatttaatttttataaaaatagattattgttggataatatgtaaatgtagttgaagttaaaattgagtttagtattaatgattatagattgttagtaaataaagggttaaaaatatattaggtgtattgtagatatttttttttatggttagtaattattattttttaaagtaattttttatagatgatttaatttttataaattatatttttaatttttaaatgtttttttaaaatatatgtaaaaagtattttatagggtttttaaaaaatgtgaatttgttaaattatatgtaaatggtataaagaattttataagttttgaaagaaaaaggagatatatatatatttttatggagaatagtaatttttatttttttgttaggatatagatattagttagaaaggtaagttgtttttttaaaatgttaaagttatagagagagaaattaaaataagtttattttgttggattaagaatgtttttttagaaatgttttatgggtttgtagaagttaagggttgagagagtgagaaggaaggaaggaatgtgtttgtatgtgtgagtggtttagtgtgtgaattaggtagagagagtgtgtggatgtgtttgtgtgtggaatggtagggatttgggaagtagttagtaggtagggtatttggtagttttttttggtagatatgtagttgggttattgtatagtgttggatgaatggtagtggggagtgaggggagatttgttgtttgtttatagggagtagtgtggtatagttagagaaagttgtattggggaggagaaattttagtttttttgtttttatttttggaggttggaaagtattttatgttttttgttgttattttaagtaagaggaaaaataggtttgttgtgaattatagttttatggttaaaatagaatgttagttaaaagtgtatggatattaagtttataaaataggatatgggtggtttttttgaaagaatataatttaataataaaagttttttgggatatatgtggattaaatgttttattggttttagtttttagtttttgaatagaggtattgttatgtttttgattgtattaggaaattagattttggaataaatgttttggtattttagggatgtgtttttagttgaaatgtaatatttttttattttgttaattaaatttataaatttttttatgaatagtttagttgattgttttttgtaaatatgtgaaaaatatgtattattaaaagtttaggatatgaatataagataaaggtagatatttttgttttaaattgattttaggtttttgagttgtattgattgtgattgggaatgaggttttttattttttagtggtgtttatatggatttattttttgattatttttttaattatttttttggttatagtattaatatgtaatattgaggtgtttttagagtgtttatgtttagggttttaggatatatgatatttaatggaggttttgttgttagatattagttattattttggatattaaatgattttaattataatgttaggagtggttggtttttggttttgggatattatgtagttattgagagatttatgagtggtttttgagattagtataaaaaagaaatagaaagttataaaaatgttaatgatgttattatgtaaatatatgtttttgtgttttgaaagatttttagtattgtagtgtttgagtataggagagttttttttatagttagtattgaaaataaatattggatataaataaatattgaaaagaaagattgttattttttgttggtgatagtggtgttttttgtaggttaataatggttatttatgttttagattagttttagaaaaaagtaagagtatttagggagggaggagagaggaataggggaaaggagaaggaaaggaaaggggatttgtaattgtttattattgatataggaagaataagaaggttagttgtttttttataggttttgattgtttagagatttataattaaagttagtttaagaagtttagtaaaggtagtttttttaattattttttttttagtatttttttttaaatttattttggtgagttttgtttttgggtttggtgagtatgggtgggaaagtatattgtgttatgttgattttttttttttgtttttggtaaaaattttatttgggtttttagtttttttggtttttttttttatttttttttgttggatatatatgttttagttgtgatttattggtttttttaggtgaagaagggtaaagattgatttggtttttttgttgaatgtgtttttagttttatttttttagtggtttgttgggtattgtaggtttgtttaaatatgagttattatttttaaatatggtgttttttttaatttttttgtgtttgtgtttagtattattgtttttttagttatttagattaaaattttattgttttttttgagggttgatttttttttgttttttatatttaattaagaggtaatttttaagttttttagttttataatttttttttttttattgtattttggttattttttttgagatttattattttatttgttttaatggttttttaaggattattttgttttttttttttggattttattttaaattttgtaatttgtttatttttttggatttttttttattgttttaggatttattttgatatgatttagttttgtttttaatttaaattatagttttttttatgagtttagggttttttttttgtttataatgattttttttagtttattttttttgattgtaatttatgttttagttaagtaaaattttaatattttaagaatttaaggtttttttttttttttattttaaatttttatttttttggtttgttaggggaaagtatgttttttgtaataggtttagtttaaatgttattatatttattatttttttttttagtttttatttaaagaaaatttttttttttttgaattttagtagtagttattatgtatttattaaattttttttgaattagagttatttatttgttttttatttttttatgttgtttataagttttttgaggataaggtttggttagaattatttgggaattatgagaatttagtattgtttttggttatgttaagttaataaatgttggttaatttattgatatagatatttaaaaggataatgtaatattataggtgtttggattattatttttaaaagttaattttttatgtgatattttattatttttttttttttttgagatagagttttatttttgttatttaggttggagtatattggtgtgattttggtttattgtaatttttgttttttgggtttaagtgatttttttgttttagtttttttaagtagttgggattataggtgtttgttattatatttagttaatttttttgtatgtttagttgagataggattttattatgttggttaggttggttttgaatttttgattataggtgatttatttgttttaattttttaaagtgttgggattataggtatgagttattatgtttggttttttaaaattgtttttgttagaagattatttttgtatttttatgttaattgaggttataaagttaaaatttaaatttgtataattttgaggtttaagtttgtaatttttggtagtatgatttataagagagttttgaatttttagtttgtaagtag

SEQ ID NO: 302 - DNA, 8020 bp, Artificial Sequence
  chemically treated genomic DNA (Homo sapiens)
ggtgtatatttgtaattttagttatttgggaggttgaggtaggagaattgtttgaatttgggaggtggaggtggaggttgtggtgagttgagattgtgttattgtattttagtttgggtaataagagtaaaattttattttttaaaataaaataaaataaaataaaataaaataaaataaaaaagtaattaaaaaatttattgaagtttttataagaaataaaatttttataatggaaattttagttgattaaatttttatgtaattaaataagtatgagtgataggttttgtgttttgtttagtaatttaataattttttaattttttgaaagtagaattattttaatttttatttgaaaaatttttataagagtttagaaaagagttatgtaaattgatatttaagttatatgggtttgggtaatttatttttagtgtttattgttaagatgatataggatatattaggtttttttttttttgtagggttttattttgttatttaggttgagtgttgtggtgtaattaaagtttattgaaattttaaattttggggtttaagtaattttttaattttaattttttaagtagttgggattataggtatgtgttattatgtttggttaattttttgtattttttgtagagatagggttttattatgttgtttaggttggttttgaatttttgagtttaagatttgtttaatttggttttttaaagtgttgggattataggtgggagttattatatttggtttattaggtttttatttagtagagagaagatattaaagtaatatatttttaagttttttatgtattattttttttttttttttatataggaaatggtttgaagataatgatatagtgtgattttttgaaattttttttgggtagtggaagggtttagattttttttttttaatttaattagatgaagagtgagagtaagtagtatttaagagtatatagataggtatatatatgtatttgtattttaattattagggttgtgttagtatggaaagtatttaataaagatttgatagattgatttttagatgttgaattatgtgttttagtggtaaagattttaatggttttgttaaaattttagtgagtttttaagtattttaagatgttaaatatttgttttttatttggaaaatgtttataaatgttttatggggatatatttttattttaaaatttattatgaataaatattttgtaataaatagtaattaaagtatatttgttttaatttttgtagtaaaagattttataagagtaattaagaggtaattatttaaataataattatagaatttgtttataaaaaatatatataatatatatattttagagagatagggttttgttttgttttttaggttggagtatagtggtataattatgggttattgtagttttgattttttagatttaagttatttttttattttagttttttaagtatttgggattatagtgaatgttattatatttggttaatatttaaaaattttttgtagatatggttttattatgttttttaggttggttttaaatttttgattttaagtaatttttttgttttagttttttaaagtgttgggattataggtatgaattattgggtttggtttttaaaattatttttgatatagtattgtgttattattttgtaaatatagtttaaattaaatttttttaatgaatgtaatatatttattataatgtaatataggaattattaatagtaaatttttgatgtgagggaaattttatttttataaagtttagttttttattaaagtttattttaggatagtaattaatttttttaaaatataaaaggttatttatttatttaggtgaagttttgttttgttatttaggttggagtgtagtagtagattttggtttattgtaatttttattttttaggtttaagtgatttttttgttttaatttttgagtagttgggattatattaggtttagttaatttttgtgtttttggtagagatagggttttattatgttggataggttggttttaaatttttgattttaagtgatttgtttgttttggttttttaaagtgttaggattataggtgtaagttattgtatttggtttaaaaaggttttttttttaatttatttaaaggaggttaagtattttaaggtataagagttgtttatttaaaatagtaaatttagtatatttattttttttagattaaaattaatatattttgtattagtaaaataaataatgttatttgttttttttttttttttttttgagaaggagttttgttttattttgtaggttggagtgtagtggtatgattttggtttattgtaatttttgttttttgggtttaagtgatttttttgttttagttttttgagtagttgggattataggagtatgttattatgtttggtttttttgtatttttagtagatatagggttttgttatgttggttaggttggttttaaatttttgattttaggtgatttatttattttggttttttaaagtgttgggagtataggtatgagttattgttggtaggttgataattttattgtttttgaagagggtgtttaattattttattgtgataaaattttgtttgtttgttttttgagatggagttttgttttgttgtttaggttggagtgtaatggtatgattttagtttattgtaatttttatttttttattttgagtgatttttttgttttagttttttgaatagttgggattgtaggtttgtgttattaagtttggttaatttttgtattttttgtagagatagggttttattatgttggttagtttggttttgaatttttgattttatgatttgtttattttggttttttaaagtgttgggattataggtgtgagttattgtgtttagttgtaataaattttttaattttgaaaaatatattatttgggatgagttattagtaaagtataattttatatgtagtagtataaaaaatgtttagatgtttagggttttttttaaaattttattattttggaagattaataatagttttattaaataattttatatatgaatgaaaaatggagaaaaattttattaagatgttaattttattaaaatgaaatgggttattttttttttttgttagaaaaaaaaaggttgggaaaataaaatttataagttggttttttttttttttttttttttatgagttggttttaaggttatttttaatatttattttttttaatgatattaatatattgttatttatttgattttaaaattgtaattggttagttttaagtgaatataagtgttatgtttttgtagttttattatatttaatttgtaatttatttaataaaagattttaaatttataatgtatgtatggtgattaaaatatgagtatttttttaagttttgttattataatgtttgtttttttgggagtataatgatatggtttttttttttttttttttttgagatggagttttgtttggttgtttaggttggagtgtagtgatgtgattttggtttatagtaatttttgttttttgggtttaagtgatttttttgttttagtttttggaggaattgggattataggtgtttgttattatgtttggttgattatttgtatttttggtagagatggggttttattatgttggttaggttagttttgaatttttgattttaagtgatttatttgttttggtttttaaatataatgatttgttttaaggttgtaagtatttttattaggtatttatggggtgagtagggtggggtagatgtgttttggaatggggtatagtggataggaagtaatggtttataataatgtgaatgtttttgatgtgtagtgggagttttagaaagtgtggttgaatttgtagtttttaataaatggtttgtttttaaattttagttttaattttttttgagtgataggggtatgttattagtatggggggaaatgagatataagaaatgtttgaaagggaaaaataaggttgggttgttttttttttttggggttaagatagaggtatagaaggtttaggtttgggaggttggattatttttggttggatgttgagttgggtgggagtttaaatagtagggggtttataggaggttggtttaggtagttttgtgtttatttattaggttaggtttaggtatgtttttagtgatagtaggtttaggtatgtttgggggtttgtttagtttttgtttttgttgttttgggttatgggggtttttttgtttttgttttgttttttgggttttgtagtaggggtttttttgggttttgattttttttggttttttattttagatatgtttggagattttaggatgataagtttagggtagtttttttattagggggagtaggatgtggttgttttggtgtttgtgggaattttgggtggtgattgtgtttttttatagatttggtattgtttagagtttagttttttttttttttttggtatttttgttgttttattgagttttttagttgttagttttatagtttttttaggagaggtgggtggtgattttaatttatagtgttttttattgtgatattgttttaaatttgaggaaatttaaatttttgggtgtgtgtaggttgatgggatttgaggaggaggggtaggatgaaggggttgtgtgtgttatgttgggtgtgttgttgttgtttgagtttggtattggtgggaatgtggtgtgtttttgaggtttagttatgttttgtttgtggggtaggtgggtatttttatgtgtgtgggtatgagttgtggtaggagtgtgtggtggtagtggtggttgttttttggggtttggggtgtgtttatttgtataagtgggtgtgtgttgtttgggttgggtggatttggtgggatttgattgttttgttgtttagaggtggagaagaagaggtagtgagtggatgtgattgttttattttgggtaaaagggatagaattagaggtggggagtttgggtagttggtgatttgtgaagatttgaggtgttgtagtggtatttggagtagtgttgggttttttttggggtgtagttgttgttgggggaagggtgttataggttgggaagattttttttttttgtgtttagtagtggggtttattggagggtggtttgtgggttgggttttattgtggtgttttgggattgtggggttaggttgtgttgggtggatgtttattttgttaatttttggaggtttttgggggtttttgtgtgttttggggttgtagagatttaggggaggtgtttgtgaggtttggatttgttttggggtgaagggtatgtggtgagatagagttttgtatttttaatttttggtggaaaatttttgttgttgtttttttttattggtttggagttttttagttttgttttggtagtgttgttttttttattaagatttaggtgtaaaggtttgggtaagttgatttttttgtttttttttttgagttaggttttttggaggtttggtagttgattttagggattgagaatttgaggatatggaatatttgataattattttgtttttgtattaggaagagaaattttgtaatgaggaagtagtaaatttggggtttttgtggataaatgtgtgttgttttttgttttatgtttatgaagagttttggttttttattttgttgtgggttataaaaggttttgagatttagtttagataagttgtgtagttttaaaatgtatttaagatttgtatattttagtttaataggattaggtgaaattggaaattagttttagaaaattagagtgttttatttgtttagttattggatattatttaaaaaatttatttatttttgtttttttatattgaattttattattataaattaaggaatattttatgtttaagaggataaaaatgttattaatattttaaaaaatgagagttttgatttgaattaataattttttattagttttgtgtttttgttgggtattttgtaagttttgataagtataggtaaatgttttatgtttgtttttgtttttttaagtgttatatttggtgattttaaaaatagttattgaagtttgataattattgtttttttttgtgagttttaagttatttgtgttttgtttttgtattttgggtatttatatttttatttttttttttttttttttttttgagtagattgtgaattattttaggtaaatgatttaattttttttgtagttttggtgtttgatatatagggaggggtataaatgtgtattgaatgaatgaattgataaatttgtttagatttttttattttatatattgtgtaaagttttgttaatgttttgaaaatttgtagatattgtgaattgggttttatgtttatggaaaaatttgtattatatttgaaataaagttgttagaaatgttaagtattttattataaaggttgttattttttttttatgtttttttggtttgagaaattatattagaaagtgttttttgttgttttgtgggaaatgtgtttagtaaggaggatttagagttgatattttttttgaatgagaattaatatttaatagtaataatgttttatttatttttatgtttgataaggaaaataagaagttttttaatattaggattttaatgtaattattattttatataattttaattaaaaaaggaagtattttattgtaagaaatgataatgtgtgttaaaaaaaattgatagtagaggttgggtatggtggggtttataagtgtaattttagtatttttggaggttgtggtgggtggattatttgaggttaggaatttaagattagtttggttaatatggtgaaattttgtttgtattaaaaaaaaaaaaaaaataagataaggtgggggagaaattttaaattttgttatttagaagtaatttaaatattttgatgaataaatttttaaatgtttatatatatttatatgatattaatatttgtttttttttttgagatagagttttagtttgttgtttaggttggagtatagtagagtggttttggtttattgtaatttttgttgttttggtttaagtagtttttttgttttagttttttgagtagttgggattataggtatttgttattgtatttggttaattttgtatttttagtagagatagggttttattattttggttaggttggttttgaatttttgattttgtgatttatttgttttggttttttaaagtgttgggattataggtatgagttattgtgtttggtttttatgttatgtgttgtatgtgggattatgtttttgtttttttttttttttttttttagtaatagtattatgaatatttttttatgttaatatatggagatatgtgttataattttgaatggttgtataatattttattttatatatatattttaatttttaaaatttatatttagaatgatggatatttaggttgtgtttattattgaaatattttttattaatttttttttttttttattttttattttagttttttaatgtgttgggattataggtttgagttattatatttgattggaaatttattaattttttttgtggatatttttatatatgtatttgaatgtttttttgaagtaaatttttagaaatgggatttttgggttagagagaaagtttattttaaataattttatattttattgttttttagaaaaattgtatttattttttagtttttttaattagtgtataagaatggttatttttttatatttttttaagtattgggttttgtttatttaaaaatttttgttaaggaaaaaaaattagttttgttttttttatgttttttgtttattagtgagattatgtatttttttatatttttattggtttgataaatattttggtgttttggttgtagt

SEQ ID NO: 303 - DNA, 8020 bp, Artificial Sequence
  chemically treated genomic DNA (Homo sapiens)
gttatagttaaaatattaaaatatttgttaggttaataaaaatatgaaaagatatataattttattaataaataagaaatgtaaaaagaataaaattgattttttttttttggtaaaaatttttaaatggataaaatttagtgtttggaaaggtatgagaaaatggttatttttatgtattaattggggaaattagaaaatgaatgtaatttttttggaaagtagtaagatatggaattgtttaaaataagttttttttttaatttagaaattttatttttaaggatttattttaaggagatatttaaatatatatgtaaaaatatttataaggagaattaatgagtttttaattaggtgtggtagtttaagtttataattttagtatattgggaggttagagtaaaaaataaaaagaaaaaagaattaatggaggatgttttagtgatgaatgtaatttaaatgtttattattttgaatatagattttaaaaattagggtatgtatataaaatggaatattatgtagttatttaaaattatgatatatatttttatgtattgatatggaaagatgtttataatattgttgttgaaaaaaaaaaaaaaaaaaaatagaaatatgattttatatataatatataatgtgggggttgggtgtagtggtttatgtttgtaattttagtattttgggaggttgaggtgggtggattatgaggttaggaatttaagattagtttggttaagatggtgaaattttgtttttattaaaaatataaaattagttagatgtagtggtaggtgtttgtaattttagttgtttgggaggttgaagtaagagaattgtttgaattagggtggtagaggttgtagtgagttgagattattttattgtattttagtttgggtgatagattgagattttgttttaaaaaaaaaaataagtgttggtattatatgaatatatatagatgtttagaagtttatttattgaaatgtttgagttatttttgagtagtaaaatttgggattttttttttattttgttttattttttttttttttttagtatagatggggttttattatgttgattaggttggttttgaatttttgattttaggtgatttatttgttatagtttttgaaagtgttgggattatatttgtgagttttattatgtttggtttttattgttaattttttttagtatatattattattttttataataaaatatttttttttttaattaagattgtataaaatagtgattatattgaagttttaatattaagagattttttgttttttttattaaatataagagtgaatagagtattgttattattgagtattagtttttgtttaaggaggatgttagttttaggttttttttgttaaatatattttttataaagtaataggaaatattttttgatgtgattttttagattaggaggatatgaggaaagaataatagtttttatagtaaaatatttgatgtttttagtaattttattttaaatataatgtaaatttttttatgggtataaaatttagtttataatatttgtaagtttttaaaatattaatagaattttatataatgtatagagtgaaagagtttaaatgggtttattaatttatttatttaatatatatttgtgtttttttttatatgttagatattaagattatagaaaagattgagttatttgtttgaaataatttatagtttatttaaagaagaaaaagagagagagagtgggaatgtgaatgtttgaagtgtaaaaatagagtataagtaatttggagtttatagaagggggtaataattattaagttttaatgattgtttttgaagttattaaatgtagtatttggaaaaatagggatggatgtagggtatttgtttatgtttgttaaggtttataaaatgtttagtaggggtataaaattgataaaaagttattgatttgaattaaaatttttattttttaaaatgttaataatgtttttgtttttttaaatataaaatgttttttaatttatagtaatgaaatttgatgtgaaaaaataagaatgaatgaattttttaggtgatgtttaatagttaagtaaataagatattttggttttttgaaattaatttttaattttatttagttttgttaaattaaaatatgtaaattttaaatatgttttaaaattgtataatttatttgaattaagttttaaaattttttgtaatttataataaaatggaaagttaaaattttttatggatgtaaaatagaaaatagtgtatgtttatttatgaaaattttaagtttattatttttttattatagaatttttttttttggtataggagtaggatggttattaaatattttatgtttttaaatttttagtttttgaaattagttattaagtttttaaagaatttggtttggggagaaaagtgaggaggttaatttatttaagtttttgtgtttaggttttagtggggagggtggtattgttgggataagattgggagattttaggttggtggagggaaatggtaataggagttttttattgggaattaggggtgtagggttttgttttgttatatattttttgttttggggtaggtttgggttttataggtgttttttttggatttttgtagttttggggtgtatgaagatttttagggatttttgaaggttggtgaggtgggtgtttatttaatgtagtttgattttatagttttggagtgttgtggtgaggtttggtttatgggttgttttttggtggattttattattggatataaagggaggaggtttttttggtttgtggtgttttttttttgatggtggttgtattttggagggagtttggtgttattttggatgttgttgtggtattttaagtttttgtgggttgttgattgtttagattttttatttttggttttattttttttgtttgggatagagtagttatgtttatttgttatttttttttttttgtttttggatagtggagtagttaaattttgttggatttatttagtttggatggtgtgtgtttgtttatgtaaataaatatattttaagttttaaggggtggttattgttgttgttgtgtatttttgttatggtttatgtttgtgtgtgtagaagtgtttgtttattttgtggatggggtgtggttaagttttagggatgtgttgtgtttttattaatgttggatttgggtagtggtggtgtgtttgatgtggtgtgtgtgatttttttgttttgttttttttttttgggttttgttggtttgtgtgtgtttgggagtttgaatttttttggatttggagtaatattgtagtggaaggtgttgtgggttgaggttgttgtttattttttttaggggaattatggagttggtagttgaaagatttagtgaagtaatgaggatgttggggagagggaaggggttgggttttgggtggtgttaagtttgtgagggggtgtggttattgtttagggtttttatgaatgttaaggtggttatgttttgttttttttggtgaagaagttgttttgggtttgttgttttagggtttttagatatgtttgaggtgaagagttggaagaagttggggtttaagggagtttttgttgtggagtttgggaagtggagtgagggtgggaagatttttgtggtttggagtagtggaggtgggggttgggtagatttttgaatgtgtttgagtttgttgttgttggggatgtgtttgggtttggtttggtaagtggatgtgaggttgtttgggttggttttttgtgggttttttgttgtttgggtttttatttggtttaatatttagttggaggtgatttaattttttagatttgggttttttgtgtttttgttttgattttaaaggaaggaaatagtttagttttgttttttttttttgggtgttttttgtattttatttttttttgtgttggtagtatgtttttattgtttagaaggagttgaggttaaggtttgggaatgagttatttgttaagagttgtagatttggttatgttttttgaagtttttgttatatgttagaagtgtttatgttgttataaattgttattttttgtttgttgtgttttattttgggatatatttgttttattttatttattttataaatatttaatggaaatatttgtaattttaaaatagattattatgtttggagattgaggtaggtggattatttgaggttaggagtttgagattagtttggttaatatggtgaaattttatttttattaaaaatatgaataattagttgggtgtggtggtgggtgtttgtagttttagtttttttggaggttgaggtaggagaattgtttgaatttgggaggtggaggttgttatgagttaagattgtattattgtattttagtttgggtgattgagtgagattttgttttaaaaaaaaaaaaaaaagaaaattatattattatgtttttaaaggagtaaatgttatagtagtagagtttggaggagtgtttatattttgattattgtgtatgtattatgaatttaaggttttttattaagtaagttatagattgaatatggtaaagttataaaaatatagtatttgtgtttatttaaaattaattagttgtagttttaaaattaggtaaatggtgatatattggtgttattaggaaaaatgaatattagaaataattttaaaattaatttgtaaaaaaagaaaaaagaaaaaaattaatttgtgaattttatttttttagtttttttttttttggtgggaggagggaatagtttattttattttaataagattggtattttaatagaatttttttttattttttatttatgtgtaaagttatttagtaagattgttgttaattttttagagtgatagaattttagaagagattttggatatttagatattttttatgttattatatatggaattatattttattggtgatttattttaaatagtgtattttttagagttaaaagatttgttatggttgggtgtggtggtttatatttgtaattttagtattttgggaggttgaggtgggtagattatgaggttaggagtttaagattaggttggttaatatggtgaaattttgtttttataaaaaatataaaaattagttaggtttggtggtataaatttgtaattttagttatttaggaggttgaggtaggagaattatttgaaatggggaggtggaggttgtagtgagttgggattgtgttattgtattttagtttgggtaatagagtgagattttattttaaaaaataaataaataaaattttgttataataaagtgattaaatgttttttttaaaaataatagaattgttagtttgttggtagtggtttatgtttgtatttttagtattttgggaggttaaggtgggtggattatttgaggttaggagtttgagattagtttggttaatatagtaaaattttgtgtttattaaaaatataaaaaagttaggtatggtggtatgtttttgtaattttagttatttaggaggttgaggtaggaaaattatttgaatttaagaggtggaggttgtagtgagttgaaattgtgttattgtattttagtttgtaggatggagtaaaatttttttttaaaaaaaaaaaaaaaaaaagtagatagtattatttattttattaatatggaatatgttaattttgatttgaaaggaataaatgtattgaatttattgttttaaataaatggtttttatgttttaaaatgtttgattttttttaagtaaattgaaaaaaaaatttttttgggttaggtgtagtggtttgtgtttgtaattttagtattttgggaggttgaggtaggtgaattatttgaggttaggaatttgagattagtttgtttaatatggtgaaattttatttttattaaaaatataaaaattagttgggtttggtgtaattttagttatttagaggttgaggtaggagaattatttgaatttgggaggtggaggttgtagtgagttaagatttgttattgtattttagtttggataatagagtgagattttgtttaaataaataagtaattttttgtgttttgggaaagttagttattattttgggataagttttaatagaaaattaaattttatgggaataaaattttttttatattaggaatttgttgttagtgatttttgtattatattgtaatgaatgtattatatttattaggaagatttaatttgaattatgtttgtaaaatgataatataatgttatattaaaaataattttgggggttagatttagtggtttatgtttataattttaatattttgggaaattgaggtgagagaattgtttgaggttaggagtttgaaattagtttgggaaatatagtgagattgtgtttatgaaaaatttttaaatattagttaagtgtggtggtatttgttgtagttttaggtatttgggaggttgaggtgagaagatagtttgagtttgggaagttaaagttgtagtaatttatgattatattattgtgttttagtttgagagatagagtaagattttgtttttttaaaatgtatgtattatatgtgttttttatgggtagattttataattattatttaaatagttgttttttagttgtttttgtgaaattttttgttgtaaaaattgaagtaaatgtattttggttgttgtttattgtaaaatatttatttatagtaaattttgaaataaaaatatatttttataagatatttgtaaatattttttagataaaaagtaagtatttggtattttaaaatatttaaaagtttattagaattttgataaagttattgagatttttattattaaaatatgtaatttagtatttaaaagttggtttattaaatttttattaaatgttttttgtattgatatggttttggtggttaaaatataagtgtatatgtgtgtttgtttgtgtatttttaaatattgtttatttttattttttatttgattaagttggagggaaaaaatttgaatttttttattgtttaagaaggattttaaggaattatattatattattgtttttagattattttttatgtggaaagaaaagagaaataatatataagaaatttaaaagtgtgttgttttaatattttttttttgttaaataaaggtttgataggttaggtgtggtggtttttatttgtaattttagtattttgggaggttgagttgggtggattttgagtttaggagtttaagattagtttgggtaatatggtaaaattttgtttttataaaaaatataaaaaattagttaggtatggtggtgtatgtttgtagttttagttatttggggggttgaggttggaggattgtttgagttttggaatttgaggttttagtgagttttgattgtattatagtatttagtttgggtgataaagtgagattttgtaaaaaaaaaaaggtttgatatattttatgttattttgataataaatattggagataagttgtttaaatttatatggtttgagtgttagtttgtatagtttttttttaaatttttatagaaattttttaggtaagaattgaggtgattttatttttagaaagttaaaaagttgttaaattattaaataagatataaaatttgttatttatgtttatttaattatatagaaatttaattagttggaatttttattgtgaaaattttgttttttatggaaattttaatagattttttaattgtttttttgttttgttttgttttgttttgttttgttttgttttgagagatggagttttgtttttgttgtttaggttggagtgtagtggtgtaattttagtttattgtaatttttatttttattttttaggtttaagtaatttttttgttttagttttttgagtagttgggattataggtgtgtgtt

SEQ ID NO: 304 - DNA, 6523 bp, Artificial Sequence
  chemically treated genomic DNA (Homo sapiens)
gttggaaggagtgttttgatattaggtaggtgtgggttattgagttttttgggatttaaataggatgtgtatgtgggaggagggaatgggtgggaagaatttatgtttggttgagttttggttagtttgaggtgattttttagttttgggttgtaaggtttaggtttttggtgttagtggagaaggagagaatgagggagtttattgatttttaaggtgtatgagtgaagagtatagagtgaaggtttggttttttatggtttttgttttagtttaagaatttgtatttatgaataggggagtgttaggggaggggtaattttgggttgtgtttggagtgtaggttggtagggagtaaagttatttttgttattgttttttttggagtaggatttttaggttttttgtttggaggaggaggggtggggaatttgtaaaatttaataaagtaaaaaggggaggaggaaggaggggatttggtggggtttttgaggtggtttaagtattagtgtttttattttggtttgatttgtttgttattgaaagggttgtgtttgttgttggtgtttgggaagagagttgggttggttagttgtgtgtgtttattaatttgttgggtgggtggtgggtgggtgggttgggggttgtttgtaattttgttgttttggttgttgtggtttttggggagtgggttttggtgtttgtttttattggttgttgttgtgttagttggtgtgatttgttgttgttgtttttggtgtttggttatttagaaataaattagtttgatgattattaatagttatagttagatgtattaatatataataaattatagttttgtagaggggtgtgtaaatgagtttttattttgtgaattttattttttttgggagtttttttagtggttaggatttttttttgggttagttgtttttttattaggttggttatgatgtgttgaggttttttttggttttgtatggggtgttgagttttttggataagatgtatattttattttgtttttattaatagtttaatttggttttggtttgtaattgggtgttttatgagtatggggttttgtgtttttattttgataaggattttagtggtgttttgtttttgggtagtggtaagtagaggggttttggggattatttgtattttttttttgagtagtagtataaatttgatagtagtagtgggtagggtaaagtattttatgatgaaggtgttgattggaagtatatgagtttggtttatttttggatgtagtggatgaatttttgtgtgggtaagatatattttaagatagtggagggagaggggaaaggaggtaggaaaagaaagaaagaaggaggaaatagagtagaaagaggaatagagagaaagaaaggatgaaagaattagtaaagtttttttggttttttaaaagagaagaaaaaattagtttttaatggggttattaggttatggtagaggaagggtaaggttttagtgtttatgtaagttgatattttaggggaggatgggggtattggtatgtatatgagatttgtgatagggatagtttgaagagagagagaggttggtggggagggatagtttgtttatgtattttgagtattttgtttagttttttaagttagagggttttttgtattgtgttattgataaatattttttgttttttaatttttttttttttttgttttttagaaatttgtatagagaggtggttatttggttttttttagtgtttttttaaagttttggagggttatagttttagatttaggatttttttttttttttttttttattttttttggtttttatttaattgtttatttttagttaatttttgtttttttttgagtttatgtttgagttttatatatttgttttggagggattttttattatttttggggaattttggtattagattagatagtttaatataattttatattgttagaaattttagattatttatagttttattttttagtttttggtttttaaggattttatagggaattttaaagatttttaggaattttttaggatagagtttaatgtggattgttaaaattataatgttttttattaatatttattttatttttgggggagttttgtattttttagaagggttatataatttgggagaatgtgtaaagatttaagagggttgattatttttaattttttaaaaaatgtgttgagttttgatatggttggttatagtagtatttttagagagattattatgaatttagagtgtgtatattatttatatggttttatattatttattttagatatatatatatatatatatataaatatatatatatattttgtatttttataaaaatatgatttgggtattttaaattaagaatgtttattttgttattttgtttgtaatggtttttttatgaggtagattttttaaaaatgataatgtttattttaagttgttataggtggaaaatattttgtttggtatgaaataattttttatttagtatgttttgggttttagatatagtgggagaggttggagtggaggtggggtggtttttagtttgggtgttttttgtgggaggtattgggttgattgggttaattttttaggttttggtttattggtgtttggttgtttttgtttgtaggtgttgtgtatgggagttatgggtgttgaggttgttagatttatatgtgttattagatattggagttggagaaggagttttattttaattgttatttgatatggtgttgttgtattgagattgttaatgtgttttgttttattgagtgttagattaagatttggttttagaattgttgtatgaagtggaaaaaggaaaataagtttattaattttatgtagtttagtggggaggatttagaggtaaaggtgggtgagtagatgtttgggtagggattaggttagtgttgtaattttttttggttttgtttttttgtttttgtttgttttttaatttttttttttgtttgtttttatttgggggtttttgtagttttaggggagtttggagttttgtaagtgtttgtgtatttattttttataaaataaaataaaataaaataaaataaaataaaataaaataaaataaaattttatatatagttaatattagtggtggagtggggtgtattgtatatatttagttttgttttataaggatgtttaaattggttttggagttttggggtgtgttttgaatgtgtttggggtttttgtgttagtgtttttgagttttttgattttgggatgtggggttgttggggaggaaagagttttgggttgagttttgttttgtgtttgggtgtttttgtttaagttttttgttagtaagttttgaagggtattattaaattatttttggttagtggaaagagggggtttaagagttggagtttggttttgttgtggttttttaagttgttttttagaataggaaggaagtttgaggaataaagggggttttaatagagtttagttttttggttttgtgtgtgtaattgttagtggaagagaagtagttttagttgaggtgagttaatttgggtgtgggtggaatattatagtttggggtaggtttttggttttggatttttgtttttagtttttgatagtgtttgtgttgttgttatagtagtgtttaggatttaatgaggggtttagggttatgggagttgttagagttttggtttttagatgtgttaggggtgtttgtaatgttgggtttttagtggggagattttatttgttttttagttatatttgtgatttatttgagttttttggagttgtggaaaataattatagagatattaggtattgttaaggaatgtttttattattgtttttattttatttttggaggtttaagtaagattttagtaatttgttttatggatttttagattttaggtagtttttgtggttgtagggagtttgggtttatttgttgggtttaaggagaattttttgatttggggtttggttggtttgaggaattggattttgtgatgaagattttttaggttggatatgtaagtaaattaaattgtaaattaatgatatgaaaattatatttatatgaaagaaaaattgattatggttataaaagtgtatggaatttgattttgttttggagaaatattatataaaagttatttttaatagatgtttgttatttaagagtggtagggatattgttttttatgtgtttgtaaaaatagagttgtaattgtagttgttgttgttgtgggtaggatttatttttttaattggttaaatggtttttttttttttttgaaggtgatatttgtatttttaaaatttagagttgttggtaggatggttagtattgattttaattttgatataaaaataagaggggttgtaaaatgggggaaataaagttgttgtaaataaaatgtaagttattatttttttttaattttttgtatttttgttgggtgtgtgattggtagttgatggtttaataattggtatattttaatggaattgtgagggaaatgtaataattttgttataatgggttgtaattttaatttgattttggtttttgtagtttttggttggaagttgggtgatgagttttgtttttagtgggtggtgtttgagtttggttgaatggtggtaattggtggtgggtatgtgtttggggtgtgtgtgttattttttttgtttttatttaatttttttattagtgtatgagtttatttttagaggttattaggtaggatttatgattggataataaaagtatgtgatttgaagttgtattttatatttgggtgtttatgtaggagggaattaagtatatgttttagttatttttataatttattataaattgtgtaagggtgttatagatgtataaatgattgtgagttataaattaagtatatatattaaaaaataaatgagtttttattttgtaaatttattttgtggttgttatttaaatggtttggattattagttgtataattatggagattatagttttgtgagtgagtaatttagggatttggtgagtatgtattttggtaggtatggttatggttataatggtatggattttagtgttggttgtttgggttttggttattttggttttggagagtgtgtttgtagttatgttgttagtgttagtgtggtgtttgttgagtttaggtatagttagttggttatgtttatgtattttttttagtttgatttgttgttttgttttgttgtggtttttttgtttggtagtgatagttattatggtgggaaaaattttttaagtaattttagtggtgttttggttgatgttggtagtatttatattagtagtagagagggggttggtatggtgtttggagttgaggaggatgtttttgttagtagtgagtaggtgagtgtgtagagtgagttgagtttggtgttgtttgtttaattttagatttatttttggatgtgtaagttgtatataagttatggtaaagttagtttttttttaaatttatgtgattgtggggatgtggtttttggtttttttttttttttttgttgtttttttttagttttttttggttttattttttttagttttgtggagttttttttgttgtttttttttttttgttttttttttttttttttttttttgtgagtattttgtgtttataaatagtgggggaaatgggtgttttttgggatagtttagatgttggaagggggaggaagtaaaaaatttttttggaattttatgttttgggatgtgtttttgggttaggttagttgagtaaggtgtagagaggtagaggatggttgtagtagttgtgaattgggtttgttatggtggataatttatgaggagggttatgttggggaaatagtgttattaattatagtttttgaaaaggggtttgggggaaagaattgaggtgagagtttgtaggattttgaattttgggggtaggagggagagagaaggaaagggaagaaaaagaaaataggttttttaattttgtaggttggaaatgggaggtggtttttggggttggaattttgagggagggtgatttgaaggttatttgggtgtttaggaaagggttttgttttttgggtttttgtgtggtgggtagtttgggagggttgtgttttttgattggggtgtttggggtagggtggagggggtaggagaggggttagggaaagttggagtttgttgggatatggttttagttttagatgggtagattgtttttagggtttaaattgtattgttttttttttagaaaggaagagagaaggaaatttgggaggggtgtgtgggttggtaggtagaatttgttgagttttttgtttgggttttttgtttatgatttaagtttgtttttttggtggattttggaagataggagttggtggttaaattgttgatttttttattgtaga

SEQ ID NO: 305 - DNA, 6523 bp, Artificial Sequence
  chemically treated genomic DNA (Homo sapiens)
tttgtaatagaaaagttagtggtttagttattaatttttgttttttaaagtttgttagggggataagtttgggttatgagtagggaatttaggtgaaaagtttaataagttttgtttattagtttgtatattttttttgaatttttttttttttttttttttagaaagaaaataatatgatttggattttgggaataatttgtttatttgaggttggggttgtgttttggtggattttggttttttttggttttttttttgttttttttgttttgttttgggtgttttgattgggaggtatagtttttttaggttgtttattgtatagaaatttaggaagtaaggtttttttttgagtgtttaagtggtttttgggttatttttttttaaagttttagttttgagagttgttttttgtttttagtttgtagggttggggagtttgttttttttttttttttttttttttttttttttttttgtttttaaaatttagaattttgtaggtttttgttttgatttttttttttaagtttttttttgggggttgtaattagtaatgttgtttttttagtgtagttttttttataaattatttgttgtgataagtttgatttatggttgttatagttattttttatttttttgtgttttgtttggttggtttgatttgggagtgtgttttaaggtgtggggttttagaggggttttttgtttttttttttttttaatgtttaaattgttttagagaatgtttattttttttattatttgtgagtgtagggtgtttgtaaagaagaggaggaaggaggaaggtaggggagggagaatggtaaggagagttttgtagggttgggagaaatgagattaagagagattgggagagggtggtagagaagagaggggggattgagagttgtgtttttgtggttgtgtggatttagaaaaaggttggttttattatgatttatgtgtagtttgtgtatttaggggtagatttggggttgggtgggtggtgttgggtttggtttgttttgtgtatttgtttgtttgttgttggtaggggtgttttttttggttttggatgttgtgttaattttttttttgttgttgatgtgggtgttgttggtgttggttgaggtgttgttggagttgtttagggagttttttttgttgtggtggttgttgttgttgggtgagggggttatggtggagtagggtagtggattgggttgaggagagtgtgtggatgtggttggttggttgtatttgggtttggtgggtgttgtgttggtgttggtagtgtagttgtgggtgtgttttttggagttaaagtggttggagtttgagtggttgatgttgagatttatgttattgtagttgtagttgtatttgttggagtgtatgtttgttgagtttttgaattgtttgtttatggaattatgatttttataattatgtaattggtagtttgggttatttggatagtgattgtaaaatgagtttataaaataagagtttatttgttttttgatatgtgtgtttgatttgtggtttgtggttgtttgtgtgtttatagtatttttgtataatttatgatgaattatggaaatgattgggatatgtatttggtttttttttatgtaggtatttaaatatggggtatgattttgaattatgtgtttttgttgtttagttgtaaattttgtttgatgatttttagaggtaaatttgtgtattaataggggagttgggtggaggtgaggggggtggtgtgtgtgttttgggtgtgtgtttgttgttagttgttgttgtttagttggatttgagtgttatttgttggaggtagggtttattgtttagtttttgattgggggttgtaagggttggggttgaattgaggttatagtttattatggtaaaattattgtattttttttgtagttttattaggatgtattaattgttaggttgttagttgttgattgtgtgtttggtgaggatgtagaggattggggggaggtggtgatttgtattttatttataataattttattttttttgttttgtagttttttttatttttgtgttgaggttggggttggtattgattgttttgttagtagttttgaattttgaaaatatagatattatttttggggaagggggaaagttatttagttaattggagaaataaattttgtttgtagtagtagtagttataattatggttttgtttttgtgagtgtatgagggatagtgtttttgttgtttttaaatgataggtgtttattaaagatagtttttgtgtagtgtttttttaaggtgaggttaaattttatatatttttataattgtagttgattttttttttgtgtgaatatggtttttgtgttattagtttgtgatttgatttgtttatgtatttagtttggaaaatttttattatagggtttggttttttgagttagttgggttttaagttggagggttttttttgaatttagtgagtgggtttaggttttttgtagttatagaggttgtttggggtttggggatttgtggggtgggttattggggttttgtttagatttttaggagtaaaatgagggtgataatggaagtattttttggtagtgtttagtatttttgtagttattttttatggttttgaaagatttaagtaaattataaatatagttgagaggtaagtggagtttttttgttggaggtttggtgttgtaggtgtttttggtatgtttggaagttaggattttggtggtttttatggttttgggttttttgttgggttttgaatgttgttgtggtggtgatgtgggtgttattggaggttgggagtgggaatttggagttgggagtttattttgggttgtaatgttttatttgtgtttaggttaatttgttttggttgaggttgttttttttttattgatggttgtatatgtgggattgagagattgggttttgttggggttttttttgttttttgagttttttttttgttttgggaggtggtttgggaggttgtgataaggttgggttttagtttttagattttttttttttattggttagagatgatttgatgatgttttttgggatttattggtgagggatttaggtagagatgtttagatatgaaatggggtttggtttagggtttttttttttttagtagttttgtgttttgaggttggggagtttagagatattagtataggagttttagatgtatttagggtgtattttagaattttggagttggtttgggtatttttgtggagtgggattgggtgtgtgtagtgtgttttgttttattgttggtattggttgtgtgtgaggttttgttttgttttgttttgttttgttttgttttgttttgttttgttttgtaagaaataaatgtatagatgtttgtaaagttttgggtttttttgaagttgtggaagtttttagatgggagtaggtggggagaaaagttggggaataggtgagggtaagggggtaaagttgaaggaggttgtagtgttggtttggtttttgtttaggtatttatttgtttgtttttgtttttgagttttttttgttgggttgtgtggaattgatgagtttgtttttttttttttattttatgtggtggttttggaattagattttgatttggtgtttggtgaggtagagtgtgttggtgattttgatgtggtggtgttgtgttaggtagtggttgaagtggaattttttttttagttttagtgtttggtagtgtgtgtaggtttggtggttttggtgtttatggtttttatatatagtatttatgagtagaaatggttgggtgttggtaagttagggtttggagggttgatttagttagtttagtgttttttataagaggtatttagattagaaattattttgtttttattttagttttttttattatgtttggggtttaaagtatattgaatgggagattattttatattaagtgagatgttttttatttataatgatttggggtggatattattgtttttgaaaaatttgttttataggaaaattattataagtaaaataatagaatgagtatttttaatttgggatgtttaggttgtgtttttgtggggatgtagggtgtgtgtgtgtgtttgtgtgtgtgtgtgtgtgtgtgtttggggtgggtggtgtggaattatgtaagtagtgtatatattttgaatttatagtggtttttttgaggatgttattgtgattagttatgttggaatttaatatattttttgaagagttaaaaatggttagtttttttgaatttttatatatttttttaaattatatgatttttttgagaaatgtagaatttttttaaggataaagtggatgttaatggaaaatattataattttaataatttgtattaggttttgttttagggaatttttaggagtttttgggattttttgtggagtttttggaaattagaggttaagagatggagttataggtagtttaggatttttggtaatgtaggattgtgttgggttgtttgatttggtgttaaagttttttaagggtggtggggggtttttttaagataggtgtatgaagtttaggtatgggtttagaagagggtagaagttggttaagagtgggtagttgagtagaagttgggggagatgagggaggagagagaaaaaaattttgagtttggggttgtggttttttaaggttttggggagatattggaagaggttaaatggttatttttttgtatgggtttttgaagggtagaaaggagagggggttgggaagtaaagggtatttattagtgatgtagtgtaaaaggttttttggtttgggaagttgagtagggtatttagggtgtatggataggttgtttttttttattagtttttttttttttttaggttgtttttgttataggttttatatatgtgttagtgtttttatttttttttaaggtgttagtttatatggatattggggttttgttttttttttgttatggtttgatagttttattgggaattgattttttttttttttttaagaagttaaagaaattttgttggtttttttattttttttttttttttatttttttttttattttgttttttttttttttttttttttttttgtttttttttttttttttttttattgttttgggatatgttttatttgtgtaggagtttatttgttgtatttaagggtaaattgggtttgtgtatttttggttggtgtttttgttatggagtgttttgttttgtttgttgttgttgttgggtttgtattgttgtttgggagaaaagtgtaggtagtttttggggtttttttgtttgttattgtttgagggtgaggtgttattgaggtttttattagaatagaaatatgaggttttgtatttgtaggatgtttggttgtaggttaggattgagttggattgttggtagaaataaggtgaggtgtatgttttgtttgggagatttgatgttttgtatgaggttgggaagggttttagtgtgttatagttagtttggtagaggggtagttggtttaagaaggagttttggttgttgggaaggtttttggggaaagtgggatttataaaataggaatttatttgtgtgtttttttgtaggattgtgatttgttgtgtattagtatatttggttataattattagtagttattgaattggtttgtttttggatggttgaatgttaaaagtgatagtagtaaattgtattagttgatgtggtggtggttaatgggagtgaatgttggagtttgttttttggggattgtggtgattgaggtagtaaagttataaatagtttttagtttgtttgtttgttgtttgtttggtagattaatgggtgtgtatagttagttggtttggttttttttttgaatgttagtggtgggtatggtttttttagtggtgagtagattaggttagagtagggatattaatgtttgggttgttttaaaggttttgttaggtttttttttttttttttttttttttgttttattgaattttgtgggttttttgtttttttttttttaaataggaaatttgaaggttttgttttaggaggggtagtgataaaggtggttttgttttttgttggtttgtattttaggtatggtttagagttgttttttttttagtgtttttttatttgtgggtgtgagtttttgagttggagtaagggttatgagaaattaggtttttattttatgttttttatttgtgtgttttaggaattggtgaatttttttattttttttttttttgttagtattaggggtttgggttttgtagtttagagttgaaggattattttgagttgattaggatttagttaaatgtaggttttttttatttattttttttttttatatatatattttgtttgagttttaaggggtttaatggtttgtgtttgtttggtgttaaagtattttttttagt

SEQ ID NO: 306 - DNA, 10224 bp, Artificial Sequence
  chemically treated genomic DNA (Homo sapiens)
agtttttatagttttagtattgttttttttattttattttgattgtgtttttgttgtttatttttgtttatttattttaattttagtgttttttttagtttttgggttttaggtgatatattagttagtgggatatgggtttttataggtatttttagtttaatttagttttttttttttttttggttttttggttagtatttgtattatattggtttttattggatatttttgtagttttgggttttttttatagatatattgttggattagttgtttaatttggtttatttgtagagttttttggtttatttgattttaattgaaatttagttttttaagaaggatttggtgttggaataggtaggtattggaaagttagttgtttaggattattgttttattttattagtatttttttgttattttttattttttttttttagattttagaaatttgggagtggttggagtgagaaaatagaggtaagtggtaggtaattgttaagtattagttttagtatgtgtttagttttttagagtaggatttgtggttgtaggtgtgaaggtaaggtttgtggaaatggtagggagggtggaggggatgtaggaggtatggatgtgggtggggtgtttttattttttagggttagttagatttttttgatttttttttaggtgggttgagatttataggttggatgtgttagaggtagtggttttagagtggttttgttgtgtttattgtagtgtagaggtttttaagtgttgtttatgatgttagaatgagtggtattgttgtaggtgagggtattttagaattttggatttttaagttttatttttatattttttatatgtattgttatttttaatatttatttgtttgtagggagtgttaagttaagtattgggaaaagtatggaaagatttgtgttttggtagtttagggtgatagagttaaatgagggttgtagttgttgagggttgattatttatgttaagggaatttatttagaatgtatttttgaattttaagattatggtttagtttttgttggagttttagtttttgtagtggagagtagagtgggtggtaaagttgttgattgattttttttttttttattttaagtgaaggtttgagattttttgttttatttagtgggtaggttaagtgtgttgttttagtaaattggattaggagggttagggttggatgtggggattttttttttttagtatagtaaagttggtttttagaaatatgggtatttttgtgtggtgttttgtggttgttgttgttgtggttgtttggggtggggtgtgaggaggggatgaaggagggaaggaagggtaaggtggggggggttttgtgagagtgtgtttagttttgtttttgggttttatagtttttgtatttaggtttttattgtgtggttttttttagtttttttttgttgtttagtttggattttgggggaggtgttgaagttggggtttgttttgtggttttgtttggtttgtgtttgttagtgtttaaagttagtgaagtatgggtttaattgggttatgttgggggagtttgagtttattgagttgtgggagttggtatttgttgggtgtgttgggaagggttgtatttggttggagtgtgttaatgtgttgtgtattgtgtggggtattgtgtgtaattttatatggtagttggtttttggttgtggttattgtttttagtttgtggggtttgttatgtatatgtggtgtgatttttgtggtgattttatttggggtgttgtgtgtaaaggtttgtagtgtgtgtgtgagtagtggttttgtgtgtttatgagagtggaaggggtagttaaggggtagtgtagttgttgtgggttaagttgtggtagagggggttggtggggatagtttttgaggattaggtttgttatttttgttttattgttgaagagtgtgtgaaaatggtttattttttgttgtattttatttgtatttgggttatagatgagtagaggtggttgtttatatgtaaaaatatgttgattttaagttttttatttttaaaatgttttggttttttttgagaaagggtttgtgtttattgtttttggagtttatttttttaggtttgtttttttttaaatatttatgattttttttagaatttttagggtgaagggaaattattatttatgggagggagtttggaaaaatttagaatttttggtgggttttttgtaagtaggagttttgttgagtttttatttagtaaatatttttttttgatttagtgaattagatgttaaaatatgtatgtagttatatatttagtagtttttttgtatttttgggaattgttagtaagtaaaggttgtttttttttgggtagatattagttggaattattaggggtgtttttatagttttttttgttagtttggattttattgtagatttgttgaattaattgttgggagtggattttaggtattagtaaattttaaaaattttttaaattattgtaatatggagtttgggttgagtattattgttttggtttatttaggaatttgtggatggatagtgttttaggtttgtgtgtgtatggagatttttttatttggtataagaggatattataaatttagttggggggagtataaagttgtgatagaatgtaaagaatgaataaggggttgagtgtggtggtttatgtttgtaattttagtattttggaaggtggaggtgggtggattatttgaggttaggagtttaagattagtttggttaatatggtgaaattttatgtttattaaaaaataaaaaaaaatgagttaggtgtagtggtgggtgtttgtaattttagttatttgggaggttgaggtgggagaattgtttgaatataggaggtggaggttgtagtgagttgagattgtgttattgttttttagttttggtgatagagtgagattttgttttaaaaaaaaaaaaaaaaaaaaaaagaataaggttgggatattgtagtgtttttaaagagaaataaagtagttatggagataagaagtaggatgatttgggtatgtttattagaggtagagataagggagaaattaaagataagtttgggtttttgtttttagtaattgggagtttagtggttatttttgttgtaaagaggaagttgggtaagtgtagtagtgaggttgaagaaaagggaattaaattttggttatgtttatttgaaatgttttttagatattttagtgaaggtattggtatggaggatttagtttgagggtttaggttagtgttttagttgtggatttggggtagatgaatgtagatagattaggttagtgattaggattgagtttagattttattgtgagatatggaagttgagttagaatttgtaaaggagttgagtaggagttgtagggggtaggaggaaaattgggagagtgtagtttttgggagttaaagggagtaagttttaaatgatgttgagggggtgagaatggagaatggaatattggattttatttggtagtatatagattgttgaggattttgttttgggtagttttttggaggaagaggtaagtttggttggagtgggtagaggggagagtgaaggtgaaggattagagtgtatagagattagtgttttggtttgaggggagtagagataggtgataattatagggtagatgtaggttaaaggtgtttagttttttttttaagtaaatgggtagatgtattttatatatgtttttagtgaagggttgggtgtggtggtttaagtttgtagttttagtattttggaaggttgaggtgggtggattatttgagattaggagtttgagattagtttggttaatatggtgaaattttgtttttattaaaaatataaaaattagttgggtatggtggtgggtgtttgtaattttaggtatttaggaggttgaggtagaagaattgtttgaatttaggaggtggaggttgtggtgagttgaaattgtgttattgtattttagtttgggtgataaaagtaagatgtagttttttgttgttgtttttttaattgttaatgaggaaaggggaagttttgtgttaggtgatagagatttaattgttgagtaggtttttttgtttgtggttttttggttggtttttagatgtttaggtggttaatattagagtttgtgtagtagtgtgaggtaatttattgagataggttgggtttgtggagtttggtgagtagtggttttttttttggggtttttttttaatttttgggatatttttttgatttggagtttttttgttttattgttaggtttttttgtagattgtaagtttatttgttattattgttgttgtgtgtttgtttgtttggattgttgtgggttttgggatttgggttgggaatttgtggtggagtgggatatgaatgtggtgagtgtggggttgagggtgtatgggaagggtgaggatgggtaggttatagtgtaggtatttttgagggttgtttgggtgttgtgtgtaaggagtgttttaattgttgattttttggtggtatagagaggttaattttgtgtgggggttgggaggggagtttggattgttggttttgtaagtattttatttgttgtaagtggatttgggtttaggttgatttaggttttgtgtatgtgtattttttgtatttttttgtttttgtttttggttagaggttatttttgtgtgtttgtttggatgttggtatttgtttttgttttttgtggtaggtggggtttgtgagtggagttttggagtgatgaggttatttttgggggtgaagtgtgtgtgtttttgttttggtgtttttgttttaatgagataagagttagattttggtgatttatgttttagttttaatggttgtggtgtggttttggtttgggtgtatgtgtatattgatatgtgtatatgtatgtatgtgattggggtggtggttggtggttatggatgtgtaggattgggggatgggtgggtatggttatgggtgaggtggaggtgtttttttttgaaatgatttggagtagtatgatgagtagtggttattgtagttaagaggatttggatttggagtttgagtagtattttattgtgtgaattttgttagtttgtaggttgtgttgggattaggtgggagttagggggtgttggtgggtgggaggggaagtggttgttggagttttgttttttttggtttgttgttgtgttttgggttggtgggtagttttatttttttggttatgtggttttttgtgggttttggttggggatttgtttgtggaattgtgtgtaagattttgattttattgtttagatgttgggtgttggggtttttttggtttttgttatagataggttgaatatggaaaaagtagttgtatggtttgtggtagatttgagttgggtattatttagttatgattaaagttgattgagtagtttggattagtattttgatttttgtgtttgaatgtttttgttttttttttggggagattaggggaggatgtggagagggaagagtttttgttaggaattgagaagtatgtttaggaaaatttgagaggtagagagagattttgtttttttatttgtatttttgtatggagttagttgagtttttattttttttttgttttggtttgttattagttgttggaatgtggaagattttgttttttttttttagggtggatttggagaaagatttgggaatagataggaaagaagttttgttttggattataagtatttaggagtattttatttataggaagggggaaagttagattataaaatgtttaaagaggtggaaaaagagatttaggttattaatttaggattgtaaggtgttttggaattttttaggtatttttattattggagaattgtgtgttagatgttattggtgtgattattaggtttagagaattaggtttaggtattaggaaaaagaaatagggattgtgaagtttagtatgtttggtagaaatggggtggaaatttttatttaagtaaagaaagtggagttgtgagtgatgttttagataaaattttataaaattttttataaaatgggtggtgtttagtatgttaaaattttagtttagagtttgggtgtaagggttgagttgagtgtagatttttgggtttgtttttatgttagttagttttgagttattttttattgtggaaaggtgggaaaattataagatattaattaattgaaaaggagggttagttatggaggtgtatatttgtaattttagttatttgggagggtgaggtagaaggattatttgaatttgggaggtagaggttgtagtgagttaagattgtgttattgtattttagtttgagtgatagagtgagattttgttttaaaaatagaaaaggaagttaagtatggtggtttatatttttaatgttaatgttttgggaggttaaggtaggtggattatttgtaattaggaatttgaggttagtttggttaatatggtgaaattttatttttattaaatatataaaaattagttgggtatggtggtgtgtgattgtagttttagttatttgggagattgaattattttaattgggaggtaaaggttgtagtgagttaagattgtgttattgtattttaatttgggtgatagggtgaggttttgttttaaaaaaaagaaagaaggttgggtttggtgatttatgtttgtaattttagtattttgggaggttaaggtaggtagattatttgaggttaagagtttgagatttgttaggttaatatagtaaaattttgtttgtattgaaaatataaaaaaattatttggttatggtggtgtgtgtttgtaattttagttattggggaggttgaggtaggagtattatttgaatttagaagatagaggttgtagtgagttgagattgggttattgtattttagtttggatgagagagtaagattttgttttaaaaaaaaaaaaaaaaaaaaagaaagaataggaggttgagaagttttaagttatatgttaaaaaaaaagaaaaaaatattagttttaggttaggtgtagtggtttatatttttaattttagtattttggaaagttgaggtgggtggattatgaggttaggagtttaagattagtttggttaaaatggtgaaattttgttttgattaaaaatataaaaaattagttagttgtggtggtaggtatttgtaattttagttatttgggaggttgaagtagagaattgtttgaatttaggaggtagagattgtaatgagttaagattgtattattgtattttagtttggaaaatagagtgagattttgttttaaaaaaaaaattattagtttttatggatagtggtagagtggagggtgggtttttatggtgtagaagggaaattttatggttttgttgtgtatttgattgggatggttgttgaaatttttttttagtaggtagttttggaaatagaaaaagaaatttttttttttttagaattttggaagggttgtgtagtgtttttaatttaagtttgttttttgagtgaagatagggaggtttattattagaagggaaggggttggaaatgaggttattgtattttagtttagggtttttgggttatttaggaagggaagaaggagtaagtttttttattgttaggtaggagtttagagttattataagaataagttagtattatttttgtgttttttttgttttgtaaataaaatgatttttttttttgttttggtattagagtttgtttggtattttttttgtttttagtattttttttatttgggtatttttttttgttggtgtattgaataaatatatttattgttttatttatagtttttagtttttattttttagggtttatattatttgtttttattaatttgataaggttgtttattgtttttagtaaggtttgtattggggtttttattttagtgtttttttttatttaggagatttttggatatttggggaagaaaatgagtttaaatttttatttttttttttttattttttttttgtaaggttttggttttagtttttagttttatatttttgttggttgtagaatagtagtgggttttgggtaaggagtattttgttaaaatgttttattttgtttttttatttgttttttttatttgtttttattagatggtttaagtgtttaaggggattttagggtggagttagggagaattttggtttttttgggttaggtataagattattttataggaaattttgtgggaatttttttgggataaagtattggttagtgttgagtttagttgtgtttgtgatatttgtattttaattagggtttatttgatgttaataggaagtaaggttgatgtagtggggttaagggagtttgggagaagaaagttggtttagagttttggttgttttgttttatattttatttttttggtaagaatttagtttttagatgaggtggggagtgagtggttgagttaaaaatttttgggttgggtatgatggtttatgtttgtaattttagtattttgggaggtgaaggtaggtggattatttgaggttaggagtttaagattaatttggttaatgtggtgaaattttatttttattaaaaatataaaaattagttgggtgttgttgtggtatgtgtttgtagttttagttatttgggagtttgaggtaggagaattgtttgaatttaggaggtagaatttgtagtgagttaagatttagttattgtattatagtttgggtgatagagtgaggttttgttttaaaaaaaaaaaaaatttttgggttaaatttttagatagtataggtaggtgtagaaatttattaggaagttgtttgtgtatttttggtagattggagtttggtttaaagttgttttttatgtagtttgggttaaggttaaatattatgttatagtgattttttttattatgtgtgagatatggagaattggttttaagtattattttgtttattggtggttggattattgatgtgtattattttttattttttttattttgtagtgggttatggttttgtgttggggtagaggagaaaaatgggttgttttttttaggataaatttttattttaatttaattagggtgttgtgattagaatgtgtaattgaggtgtgattttattgattttttttttttttgagattgagttttgtttttgttgtttaggttggagtgtgatggtatgattttagtttattgtaatttttattttttgagtttgagtaatttttttgttttagttttttaagtagttgggattataggtatgtgttattatgtttggttaattttgtatttttagtagagatggggtttttttatgttggttaggttggttttaaatttttgattttaggtgatttatttgttttggttttttaaagtgttagaattataggtgtgagttaatgtgtttagtttgtttttgttttttgtgttttgaagtagggttttatttagttttttaggttggagtgtagtgatatgataatagtttattgtagttgtaattttttgggtttaaatgatttttttattttagttttttgaatagttgggattataggtatattattatatttggttaatttttttttttttttttttagtagagatgaggttttgttatgttgtttaagttggttttaaatttttgaggattaagtgatttttttattttagttttttaaaatgttgggattgtagatgtgagttattatatttagtttgattttattttaaatgagagtttttttttagagttttttagttgtttttggtttttggttatgtgtttttagttgtttttgtttttgtggtatttttaaggttatatttagtgttgaggttttaggtaggtagtagagagaagttaaatgattttgttttttttttatttatttagagtatgtaaaattaggagtagtggtgggtttagggtgggtattagttatgtatatgtatattagggatagggggttaaaggtagttagtttttaaagattgttttagaggttattttttagagaagttttgggttttttaagggttttgtgtttatgttggtttattttgtagg

SEQ ID NO: 307 - DNA, 10224 bp, Artificial Sequence
  chemically treated genomic DNA (Homo sapiens)
tttgtaagatgggttagtatggatatagggtttttgaggaatttagggtttttttgaaaaatggtttttggggtagtttttggaaattgattgtttttggttttttgtttttgatgtatatatatatagttggtgtttattttgaatttattattgtttttggttttgtatgttttgggtggataagggaaagatagaattatttggtttttttttgttgtttgtttagggttttagtattgaatgtagttttaaggatattatagaagtaggggtaattgaaggtatatggttaggggttaggaatagttgagggattttgaagagggatttttatttaaagtaaaattaggttgggtgtggtggtttatatttgtaattttagtattttgggaggttaaggtaggaggattatttgatttttaggagtttgagattagtttgggtaatatagtaagattttatttttattaaaaaaagaaaaaaaaaaattagttaggtgtggtggtgtgtttgtagttttaattgtttaggaggttgaggtgggaggattgtttgagtttgggagattgtagttatagtaagttattattgtgttattgtattttagtttggggaattgagtgagattttgttttaaaatataaaaaataaaaataggttgggtatgttggtttatgtttgtaattttagtattttgggaggttgaggtgggtggattatttgaggttaggagtttgagattagtttgattaatatggagaaattttgtttttattaaaaatataaaattagttaggtgtggtggtatatgtttgtaattttagttatttaggaggttgaggtaggagaattgtttaaatttgggaggtggaggttgtagtgaattgagattgtgttattgtattttagtttgggtaataagagtgaaatttggttttaaaaaaaaaaaaaattagtaaaattatattttaattgtatattttgattatagtattttagttgagttggagtgagggtttgttttggagaaggtagtttattttttttttttgttttggtatggggttatgatttattgtagggtgagaggagtggagagtggtgtatattagtagtttagttattagtggatagagtagtatttggagttagttttttatgttttatatatagtgagaaaaattattgtgatatgatgtttaattttgatttaagttgtataaaaggtagttttaggttaggttttaatttgttagaggtatataggtagttttttggtgggtttttgtatttgtttgtgttgtttggagatttggtttaaagattttttttttttttgagatgaagttttattttgttgtttaggttgtagtgtagtggttggattttggtttattgtaagttttgttttttgggtttaagtgatttttttgttttagatttttgagtagttgggattataggtgtgtgttataataatatttggttaatttttgtatttttagtagagatgggattttattatattggttaggttggttttgaatttttgattttaagtgatttgtttgtttttattttttaaagtgttgggattataggtgtgaattattgtatttgatttagagatttttaatttgattatttattttttattttatttagggattggatttttgttggaagggtggagtgtgggatagggtagttagggttttgaattgattttttttttttagatttttttggttttattgtattagttttattttttgttgatgttagataggttttagttagaatgtgagtgttatagatatagttaagtttagtgttgattaatattttgttttagaagaatttttataaggttttttgtagaatgattttgtgtttagtttaggagagttagggttttttttgattttgttttggagtttttttaagtatttaaattatttgatggggataaatggagaggatagatgagggagtagggtggagtgttttagtagaatgttttttatttagaatttgttgttattttgtagttagtaaggatgtggggttaagaattaaggttagggttttataggaaaaaggtaaagggggaggggtgggaatttaagtttatttttttttttaagtatttaaaggttttttggatggagaagagtattggagtaaaaattttagtataaattttattggggatagtgggtaattttgttgggttagtaaaaataaatggtgtgggttttggaaaatgagggttggaggttgtgaataaagtagtggatgtgtttgtttagtatattaatgggaagaagtatttagatgggaggagtattaggggtaggagaaatgttagatagattttagtgttagggtaagaaggaagattattttgtttgtagaatagggagggtatagggatggtgttaatttgtttttgtgatggttttgagtttttatttaataatgagaaagtttgtttttttttttttttttggatgatttaggagttttgggttgggatgtagtgattttatttttagtttttttttttttggtgatgaatttttttatttttatttagaaaatagatttggattagaggtattgtatagtttttttaggattttaaaggaggaagagtttttttttttgtttttaaagttgtttgttggaagaggattttaatagttattttagttggatgtatagtaggattatggaattttttttttgtattatagggatttattttttattttattattgtttataaaaattgatggttttttttttgagatagagttttgttttgttttttaggttggagtgtagtggtgtgattttggtttattgtaatttttgttttttgggtttaagtaattttttgttttagttttttaagtagttgggattataggtgtttgttattataattggttaattttttgtatttttagttgagatggggttttattattttggttaggttggttttgaatttttgattttatgatttatttattttggttttttaaagtgttgggattaaaggtgtgagttattgtatttggtttaaaattgatgtttttttttttttttttaatatataatttgggattttttagttttttattttttttttttttttttttttttttttgagatagagttttgtttttttatttaggttggaatgtagtggtttagttttgatttattgtaatttttgttttttgggtttaagtgatatttttgttttagtttttttagtagttgggattataggtatatattattatggttagataatttttttgtatttttagtatagatggggttttgttatgttggtttggtaggttttgaatttttggttttaagtgatttgtttgttttggttttttaaaatgttgagattataggtatgagttattaagtttagtttttttttttttttttgagatagagttttattttgttatttaggttggagtgtagtggtatgattttggtttattgtaatttttgttttttggttgaagtgatttagttttttaagtagttgggattatagttatatattattatgtttggttaatttttgtatgtttagtagagatagggttttattatgttggttaggttgattttgaatttttgattgtaaatgatttatttgttttggttttttaaagtattggtattagaggtgtgagttattgtatttggtttttttttttatttttgagatagagttttattttgttatttaggttggagtgtagtggtatgattttggtttattgtaatttttgttttttaggtttaagtgatttttttgttttatttttttaagtagttgggattataggtgtgtatttttgtggttagtttttttttttaattggttagtgttttgtggtttttttatttttttatagtggaaaatggtttaggattgattgatatgaagataagtttaggggtttatatttaatttaatttttgtatttaagttttgggttaagattttggtgtgttgagtattatttattttgtaaggaattttgtaaaattttatttgaagtattatttataattttattttttttatttaaataaggatttttgttttatttttgttaggtatattgagttttatagtttttgttttttttttttggtgtttaggtttggttttttgagtttggtggttatattaatggtatttggtatatagttttttgataatggggatatttaggaggttttgagatattttatagttttgggttagtaatttggatttttttttttatttttttaggtattttataatttagttttttttttttttgtgggtaaagtgtttttgaatgtttatggtttaaaataagattttttttttatttatttttaaatttttttttagatttattttagaggaagggaatagaattttttatattttagtagttggtgataggttagaatagggaagaggtgagggtttagttggttttatataggagtgtagatggaggagtaggatttttttttgttttttaagtttttttaaatatattttttaatttttggtgaggatttttttttttttatatttttttttagtttttttaaggagggagtaggagtatttgaatgtggaaattgaggtgttagtttaaattgtttggttggttttagttatagttggataatgtttggtttaggtttattataagttatatagttgttttttttgtgtttaatttgtttgtgatagaaattaagggggttttggtatttagtatttaggtggtggaattggggttttatgtatggttttgtgggtaggtttttggttaggatttgtggggagttatgtagttaggagggtggggttgtttattgatttaggatgtggtaatggattggggagggtggagttttagtgattgtttttttttttgtttgttggtattttttggtttttatttggttttggtgtggtttgtgagttagtgaggtttgtgtggtgaagtattgtttgagttttgagtttgagtttttttggttgtagtagttattgtttgttgtgttgttttaggttattttgaaagaaggtgtttttgttttgtttatagttgtatttgtttgttttttagttttgtgtgtttgtagttgttaattattgttttggttgtgtgtgtgtgtgtatgtgtgttagtgtgtgtgtgtgtttgggttagagttgtgttgtaattgttaagattgaaatgtagattgttgggatttagtttttgttttattggggtaggaatgttggggtggggatatgtatgttttgtttttaggaatgattttattgttttggagttttatttatagattttatttattatagggaatgggggtgggtgttagtgtttgggtaagtgtataagagtggtttttggttggaggtgagggtgggaaggtgtgggaagtgtgtgtgtgtggagtttgggttagtttgggtttgggtttgtttgtagtgggtggagtatttgtggagttggtaatttaggttttttttttagtttttgtgtagaattagtttttttgtgttgttgggaaattggtaattagaatgttttttgtgtgtggtatttaggtagtttttgagaatgtttgtattgtggtttgtttatttttgttttttttatatgtttttggttttgtgtttattatgtttgtgttttgttttattgtgggtttttagtttaggttttggggtttgtaatagtttaggtagatgagtgtgtggtagtggtagtggtaggtgaatttgtaatttgtagagaggtttggtggtgaggtggaggagttttaggttggggaaatgttttggagattgaagggaagttttagggagagggttgttgtttgttaggttttgtaggtttgatttattttagtgggttattttatattgttatgtggattttaatgttggttatttgggtgtttggaaattggttggaaggttataggtagagaggtttgtttaatagttggatttttattgtttagtatagaattttttttttttttattggtaattaaaaaaataataataaaaaattgtgttttgtttttgttatttaggttggagtgtaatggtgtgattttggtttattgtaatttttgttttttgggtttaagtgatttttttgttttagttttttgagtatttaggattataggtgtttgttattatgtttagttaatttttgtatttttagtagagatggggttttattatgttagttaggttggttttaaatttttgattttaggtgatttatttgttttggttttttaaagtgttgggattataggtttgagttattgtatttggttttttattgggaatgtatatggaatatatttgtttatttatttgaaggaaaaattaaatatttttaatttatgtttgttttgtggttgttatttgtttttattttttttagattaagatattggtttttatatattttaattttttgtttttatttttttttttatttattttagttaggtttgtttttttttttaggaaattgtttgggatagggtttttagtgatttgtgtattattaaatggaatttagtgttttattttttatttttatttttttagtattatttgaagtttgttttttttgatttttaggggttatatttttttagttttttttttattttttgtagtttttgtttagtttttttgtagattttgatttaatttttatattttatgatgaagtttgggtttagttttgattattggtttggtttgtttatatttatttgttttagatttatggttgaaatattgatttaaatttttagattagattttttgtgttagtatttttattaggatgtttaaaagatgttttaagtgaatatggttaaaatttaatttttttttttttagttttattgttatatttgtttagttttttttttgtagtaaaaatggttattaggtttttagttattggagataaaagtttaaatttatttttgattttttttttgtttttatttttgataaatatgtttaaattattttgttttttatttttatggttattttatttttttttgagaatgttgtaatgttttagttttgttttttttttttttttttttttttttgagatagagttttattttgttgttaaggttggagggtagtggtatgattttggtttattgtaatttttgttttttgtgtttaagtaatttttttattttagttttttgagtagttgggattataggtatttgttattatgtttggtttatttttttttattttttagtagatatgaggttttattatgttggttaggttggttttgaatttttgattttaggtgatttatttgtttttgttttttgaagtgttgggattataggtatgagttattgtgtttggttttttgtttattttttgtattttgttataattttgtgttttttttagttgaatttgtgatgtttttttgtattggatgagagggtttttatgtatatatagatttgggatattatttatttataagtttttaaataggttagagtagtgatgtttaatttagattttatgttataataatttggggagtttttaaaatttattgatgtttagggtttatttttagtagttgatttaataggtttgtggtgggatttaggttagtggggaggattgtaaaagtatttttggtgattttagttggtgtttatttaggggagagtaatttttgtttgttggtgatttttaggggtgtagaaggattgttgggtgtgtggttgtgtgtatattttagtatttgatttattgggttagaaaagggtgtttgttaaataaagatttaataaaatttttgtttgtagggggtttattaaaggttttaaatttttttaggtttttttttataggtggtaatttttttttattttaaaggttttggagggggttatgagtgtttgagaagaggtaagtttgggaagatggattttgaggatagtaggtataaatttttttttaagaagggttaaggtattttaaagataagaaatttaaaattagtgtatttttatatataagtagttatttttgtttatttgtggtttagatatgagtggagtgtgataagggataaattatttttgtgtattttttagtgatggggtgaaagtaatggatttagtttttgggagttgtttttgttgattttttttgttgtgatttgatttgtggtgattgtgttgttttttggttgttttttttgtttttgtaggtgtgtggggttattatttatgtgtgtattgtaggtttttgtgtatgatgttttagatgaagttgttatagaggttgtattatgtgtgtgtggtgggttttgtgggttggaagtggtggttatggttagggattagttgttgtgtggggttgtatgtggtgttttgtgtgatgtgtagtgtgttggtatgttttagttgggtgtggttttttttagtgtgtttagtgggtgttagtttttgtagtttaatgagtttaggtttttttgatatggtttggttgggtttgtgttttgttggttttgggtgttagtaagtgtgggttgggtggggttatagggtgggttttgattttagtgttttttttaggatttagattgggtggtgggaaggagttgaggagagttgtgtaatggaaatttgggtgtagggattgtggggtttgaaggtggggttgggtgtgtttttgtagagttttttttgttttgttttttttttttttttttgttttttttttatattttattttggatggttataatgatggtgattgtaaagtattatgtggagatatttgtgtttttggaggttagttttattgtgttagaggaagagggtttttatatttggttttggtttttttggtttggtttgttgaagtaatatatttggtttatttattgggtggggtaggaagttttgagtttttatttggggtgaggaggagggagattggttagtagttttattgtttgttttgttttttattgtggagattggggttttggtagaggttggattgtgattttgaggtttaggggtgtattttgggtggatttttttggtatgggtggttggtttttagtaattgtagtttttatttggttttgttattttgggttgttaggatataagtttttttatgttttttttagtgtttgatttggtattttttgtaggtaggtgggtattgaggatggtaatgtatgtgggggatgtgggagtagggtttagaggtttaaggttttaggatatttttatttgtagtaatattatttattttggtattgtgagtagtgtttagaagtttttgtattgtagtaagtatagtggggttgttttggagttattgtttttagtatatttagtttgtaggttttagtttatttgggggaaagttaggaaggtttgattggttttggaaggtgggggtattttatttatatttatgttttttgtattttttttattttttttgttatttttataggttttatttttgtgtttgtagttgtaggttttgttttgaggggttgaatatatgttggagttggtgtttggtaattgtttgttatttgtttttgtttttttgttttagttgtttttagatttttgggatttaggagagagaagtggagagtggtaggaaggtgttggtaaagtgggatagtggttttgagtagttaattttttagtgtttatttgttttaatattaggttttttttaggaggttgggttttagttagggttagatgggttaggaaattttgtaagtgggttaggttgggtagttggtttagtagtgtgtttgtgaggaaggtttgaagttgtaagggtgtttagtggaggttagtgtgatgtaggtgttggttagggggttaaggaaaaggaaggggttgggttgggttgagaatgtttgtgggggtttatgttttattagttggtgtgttatttgaggtttaaggattgaaaagagtattggggttgaggtgggtgggtaaagataaatagtagggatgtagttggggtaggatggggagggtggtattggggttgtgggggtt

SEQ ID NO: 308 - DNA, 28 bp, Artificial Sequence
  Detection primer for MDR1
taagtatgttgaagaaagattattgtag

SEQ ID NO: 309 - DNA, 28 bp, Artificial Sequence
  Detection primer for MDR1
taaaaactatcccataataactcccaac

SEQ ID NO: 310 - DNA, 20 bp, Artificial Sequence
  Detection primer for APOC2
atgagtagaagaggtgatat

SEQ ID NO: 311 - DNA, 20 bp, Artificial Sequence
  Detection primer for APOC2
ccctaaatccctttcttacc

SEQ ID NO: 312 - DNA, 23 bp, Artificial Sequence
  Detection primer for CACNA1G
gggatttaagagaaattgaggta

SEQ ID NO: 313 - DNA, 20 bp, Artificial Sequence
  Detection primer for CACNA1G
aaaccccaaacatcctttat

SEQ ID NO: 314 - DNA, 20 bp, Artificial Sequence
  Detection primer for EGR4
cccaaacataaacacaaaat

SEQ ID NO: 315 - DNA, 20 bp, Artificial Sequence
  Detection primer for EGR4
agggggattgagtgttaagt

SEQ ID NO: 316 - DNA, 20 bp, Artificial Sequence
  Detection primer for AR
gtagtagtagtagtaagaga

SEQ ID NO: 317 - DNA, 20 bp, Artificial Sequence
  Detection primer for AR
accccctaaataattatcct

SEQ ID NO: 318 - DNA, 23 bp, Artificial Sequence
  Detection primer for RB1
tttaagtttgtttttgttttggt

SEQ ID NO: 319 - DNA, 22 bp, Artificial Sequence
  Detection primer for RB1
tcctactctaaatcctcctcaa

SEQ ID NO: 320 - DNA, 22 bp, Artificial Sequence
  Detection primer for GPIb beta
ggtgataggagaataatgttgg

SEQ ID NO: 321 - DNA, 20 bp, Artificial Sequence
  Detection primer for GPIb beta
tctcccaactacaaccaaac

SEQ ID NO: 322 - DNA, 24 bp, Artificial Sequence
  Detection primer for MYOD1
attaggggtatagaggagtattga

SEQ ID NO: 323 - DNA, 22 bp, Artificial Sequence
  Detection primer for MYOD1
cttacaaacccacaataaacaa

SEQ ID NO: 324 - DNA, 19 bp, Artificial Sequence
  Detection primer for WT1
taactaccctcaacttccc

SEQ ID NO: 325 - DNA, 20 bp, Artificial Sequence
  Detection primer for WT1
aaagggaaattaagtgttgt

SEQ ID NO: 326 - DNA, 22 bp, Artificial Sequence
  Detection primer for HLA-F
ttgttgtttttaggggttttgg

SEQ ID NO: 327 - DNA, 22 bp, Artificial Sequence
  Detection primer for HLA-F
tccttcccattctccaaatatc

SEQ ID NO: 328 - DNA, 24 bp, Artificial Sequence
  Detection primer for ELK1
aagtgttttagtttttaatgggta

SEQ ID NO: 329 - DNA, 20 bp, Artificial Sequence
  Detection primer for ELK1
caaacccaaaactcacctat

SEQ ID NO: 330 - DNA, 25 bp, Artificial Sequence
  Detection primer for APC
aggaagtattgaagatgaagttatg

SEQ ID NO: 331 - DNA, 21 bp, Artificial Sequence
  Detection primer for APC
ttccaataaaacaataaactc

SEQ ID NO: 332 - DNA, 20 bp, Artificial Sequence
  Detection primer for ARHI
gtgagtttttggggtgttta

SEQ ID NO: 333 - DNA, 25 bp, Artificial Sequence
  Detection primer for ARHI
tcaatcttactttcacactacataa

SEQ ID NO: 334 - DNA, 22 bp, Artificial Sequence
  Detection primer for BCL2
gtattttatgttaagggggaaa

SEQ ID NO: 335 - DNA, 18 bp, Artificial Sequence
  Detection primer for BCL2
aaaaaccacaatcctccc

SEQ ID NO: 336 - DNA, 20 bp, Artificial Sequence
  Detection primer for BRCA1
tggatgggaattgtagtttt

SEQ ID NO: 337 - DNA, 19 bp, Artificial Sequence
  Detection primer for BRCA1
ttaaccacccaatctaccc

SEQ ID NO: 338 - DNA, 20 bp, Artificial Sequence
  Detection primer for CALCA
gttttggaagtatgagggtg

SEQ ID NO: 339 - DNA, 21 bp, Artificial Sequence
  Detection primer for CALCA
ccaaattctaaaccaatttcc

SEQ ID NO: 340 - DNA, 21 bp, Artificial Sequence
  Detection primer for CCND2
ttttggtatgtaggttggatg

SEQ ID NO: 341 - DNA, 21 bp, Artificial Sequence
  Detection primer for CCND2
cctaacctccttcctttaact

SEQ ID NO: 342 - DNA, 21 bp, Artificial Sequence
  Detection primer for CDH1
caaataaaccctcaaccaatc

SEQ ID NO: 343 - DNA, 18 bp, Artificial Sequence
  Detection primer for CDH1
tggagggggtaggaaagt

SEQ ID NO: 344 - DNA, 19 bp, Artificial Sequence
  Detection primer for CDKN1B
gtggggaggtagttgaaga

SEQ ID NO: 345 - DNA, 20 bp, Artificial Sequence
  Detection primer for CDKN1B
atacacccctaacccaaaat

SEQ ID NO: 346 - DNA, 20 bp, Artificial Sequence
  Detection primer for CDKN2a
ttgaaaattaagggttgagg

SEQ ID NO: 347 - DNA, 20 bp, Artificial Sequence
  Detection primer for CDKN2a
caccctctaataaccaacca

SEQ ID NO: 348 - DNA, 20 bp, Artificial Sequence
  Detection primer for CDKN2a
ggggttggttggttattaga

SEQ ID NO: 349 - DNA, 20 bp, Artificial Sequence
  Detection primer for CDKN2a
aaccctctacccacctaaat

SEQ ID NO: 350 - DNA, 22 bp, Artificial Sequence
  Detection primer for CDKN2B
ggttggttgaaggaatagaaat

SEQ ID NO: 351 - DNA, 22 bp, Artificial Sequence
  Detection primer for CDKN2B
cccactaaacatacccttattc

SEQ ID NO: 352 - DNA, 21 bp, Artificial Sequence
  Detection primer for CD44
gaaaggagaggttaaaggttg

SEQ ID NO: 353 - DNA, 21 bp, Artificial Sequence
  Detection primer for CD44
aactcacttaactccaatccc

SEQ ID NO: 354 - DNA, 22 bp, Artificial Sequence
  Detection primer for CSPG2
ggataggagttgggattaagat

SEQ ID NO: 355 - DNA, 22 bp, Artificial Sequence
  Detection primer for CSPG2
aaatctttttcaacaccaaaat

SEQ ID NO: 356 - DNA, 22 bp, Artificial Sequence
  Detection primer for DAPK1
aaccctttcttcaaattacaaa

SEQ ID NO: 357 - DNA, 21 bp, Artificial Sequence
  Detection primer for DAPK1
tgattgggttttagggaaata

SEQ ID NO: 358 - DNA, 21 bp, Artificial Sequence
  Detection primer for GGT1
gtgaagggtgtgagttgttta

SEQ ID NO: 359 - DNA, 19 bp, Artificial Sequence
  Detection primer for GGT1
cacaatcaatttcccacaa

SEQ ID NO: 360 - DNA, 19 bp, Artificial Sequence
  Detection primer for GSTP1
atttgggaaagagggaaag

SEQ ID NO: 361 - DNA, 21 bp, Artificial Sequence
  Detection primer for GSTP1
taaaaactctaaaccccatcc

SEQ ID NO: 362 - DNA, 20 bp, Artificial Sequence
  Detection primer for HIC-1
tgggttggagaagaagttta

SEQ ID NO: 363 - DNA, 21 bp, Artificial Sequence
  Detection primer for HIC-1
tcatatttccaaaaacacacc

SEQ ID NO: 364 - DNA, 25 bp, Artificial Sequence
  Detection primer for LAP18
gagtttgtatttaagttgagtggtt

SEQ ID NO: 365 - DNA, 22 bp, Artificial Sequence
  Detection primer for LAP18
aacaaaacaataccccttctaa

SEQ ID NO: 366 - DNA, 21 bp, Artificial Sequence
  Detection primer for LKB1
catcttatttacctccctccc

SEQ ID NO: 367 - DNA, 22 bp, Artificial Sequence
  Detection primer for LKB1
taaaagaaggatttttgattgg

SEQ ID NO: 368 - DNA, 22 bp, Artificial Sequence
  Detection primer for LOC51147
attagggatgagaggatttgta

SEQ ID NO: 369 - DNA, 24 bp, Artificial Sequence
  Detection primer for LOC51147
tcttcctaaccatacacactaacc

SEQ ID NO: 370 - DNA, 22 bp, Artificial Sequence
  Detection primer for MGMT
aaggttttagggaagagtgttt

SEQ ID NO: 371 - DNA, 23 bp, Artificial Sequence
  Detection primer for MGMT
accttttcctatcacaaaaataa

SEQ ID NO: 372 - DNA, 20 bp, Artificial Sequence
  Detection primer for MLH1
taaggggagaggaggagttt

SEQ ID NO: 373 - DNA, 22 bp, Artificial Sequence
  Detection primer for MLH1
accaattctcaatcatctcttt

SEQ ID NO: 374 - DNA, 22 bp, Artificial Sequence
  Detection primer for MNCA9
gggaagtaggttagggttagtt

SEQ ID NO: 375 - DNA, 22 bp, Artificial Sequence
  Detection primer for MNCA9
aaatcctcctctccaaataaat

SEQ ID NO: 376 - DNA, 22 bp, Artificial Sequence
  Detection primer for MYC
agagggagtaaaagaaaatggt

SEQ ID NO: 377 - DNA, 22 bp, Artificial Sequence
  Detection primer for MYC
ccaaataaacaaaataacctcc

SEQ ID NO: 378 - DNA, 22 bp, Artificial Sequence
  Detection primer for N33
ttttagattgaggttttagggt

SEQ ID NO: 379 - DNA, 22 bp, Artificial Sequence
  Detection primer for N33
atccattctacctcctttttct

SEQ ID NO: 380 - DNA, 18 bp, Artificial Sequence
  Detection primer for PAX6
ggaggggagagggttatg

SEQ ID NO: 381 - DNA, 22 bp, Artificial Sequence
  Detection primer for PAX6
tactatacacaccccaaaacaa

SEQ ID NO: 382 - DNA, 19 bp, Artificial Sequence
  Detection primer for PGR
ttttgggaatgggttgtat

SEQ ID NO: 383 - DNA, 21 bp, Artificial Sequence
  Detection primer for PGR
ctacccttaacctccatccta

SEQ ID NO: 384 - DNA, 26 bp, Artificial Sequence
  Detection primer for PTEN
ttttaggtagttatattgggtatgtt

SEQ ID NO: 385 - DNA, 21 bp, Artificial Sequence
  Detection primer for PTEN
tcaactctcaaacttccatca

SEQ ID NO: 386 - DNA, 22 bp, Artificial Sequence
  Detection primer for RARB
ttgttgggagtttttaagtttt

SEQ ID NO: 387 - DNA, 22 bp, Artificial Sequence
  Detection primer for RARB
caaattctccttccaaataaat

SEQ ID NO: 388 - DNA, 19 bp, Artificial Sequence
  Detection primer for SFN
ctatccaacaaacccaaca

SEQ ID NO: 389 - DNA, 20 bp, Artificial Sequence
  Detection primer for SFN
gaagagaggagagggaggta

SEQ ID NO: 390 - DNA, 22 bp, Artificial Sequence
  Detection primer for S100A2
gtttttaagttggagaagagga

SEQ ID NO: 391 - DNA, 22 bp, Artificial Sequence
  Detection primer for S100A2
acctataaatcacaacccactc

SEQ ID NO: 392 - DNA, 24 bp, Artificial Sequence
  Detection primer for TFF1
aaatccctacaaaaatatctaaaa

SEQ ID NO: 393 - DNA, 21 bp, Artificial Sequence
  Detection primer for TFF1
ggttttggtgtttatgttggt

SEQ ID NO: 394 - DNA, 22 bp, Artificial Sequence
  Detection primer for TGFBR2
gtaatttgaagaaagttgaggg

SEQ ID NO: 395 - DNA, 22 bp, Artificial Sequence
  Detection primer for TGFBR2
ccaacaactaaacaaaacctct

SEQ ID NO: 396 - DNA, 22 bp, Artificial Sequence
  Detection primer for TIMP3
tgagaaaattgttgtttgaagt

SEQ ID NO: 397 - DNA, 22 bp, Artificial Sequence
  Detection primer for TIMP3
caaaataccctaaaaaccactc

SEQ ID NO: 398 - DNA, 26 bp, Artificial Sequence
  Detection primer for VHL
tgtaaaatgaataaagttaatgagtg

SEQ ID NO: 399 - DNA, 23 bp, Artificial Sequence
  Detection primer for VHL
tcctaaattcaaataatcctcct

SEQ ID NO: 400 - DNA, 22 bp, Artificial Sequence
  Detection primer for CDKN1C
ggggaggtagatatttggataa

SEQ ID NO: 401 - DNA, 23 bp, Artificial Sequence
  Detection primer for CDKN1C
aactacaccatttatattcccac

SEQ ID NO: 402 - DNA, 22 bp, Artificial Sequence
  Detection primer for CAV1
ataaataacaccttccacccta

SEQ ID NO: 403 - DNA, 22 bp, Artificial Sequence
  Detection primer for CAV1
gttagtatgtttgggggtaaat

SEQ ID NO: 404 - DNA, 22 bp, Artificial Sequence
  Detection primer for CDH13
tttgtattaggttggaagtggt

SEQ ID NO: 405 - DNA, 22 bp, Artificial Sequence
  Detection primer for CDH13
cccaaataaatcaacaacaaca

SEQ ID NO: 406 - DNA, 22 bp, Artificial Sequence
  Detection primer for NDRG1
aactttcataactcaccctttc

SEQ ID NO: 407 - DNA, 22 bp, Artificial Sequence
  Detection primer for NDRG1
ggttttgggtttagtggtaaat

SEQ ID NO: 408 - DNA, 22 bp, Artificial Sequence
  Detection primer for PTGS2
aaaactaaaaaccaaacccata

SEQ ID NO: 409 - DNA, 22 bp, Artificial Sequence
  Detection primer for PTGS2
gatttttggagaggaagttaag

SEQ ID NO: 410 - DNA, 20 bp, Artificial Sequence
  Detection primer for THBS1
tggggttagtttaggatagg

SEQ ID NO: 411 - DNA, 25 bp, Artificial Sequence
  Detection primer for THBS1
cttaaaaacactaaaacttctcaaa

SEQ ID NO: 412 - DNA, 21 bp, Artificial Sequence
  Detection primer for TMEFF2
ttgtttgggttaataaatgga

SEQ ID NO: 413 - DNA, 20 bp, Artificial Sequence
  Detection primer for TMEFF2
cttctctcttctcccctctc

SEQ ID NO: 414 - DNA, 20 bp, Artificial Sequence
  Detection primer for TMEFF2
tgttggttgttgttgttgtt

SEQ ID NO: 415 - DNA, 19 bp, Artificial Sequence
  Detection primer for TMEFF2
ctttctacccatcccaaaa

SEQ ID NO: 416 - DNA, 22 bp, Artificial Sequence
  Detection primer for PLAU
tattataggaggattgaggagg

SEQ ID NO: 417 - DNA, 22 bp, Artificial Sequence
  Detection primer for PLAU
cccataaaatcataccacttct

SEQ ID NO: 418 - DNA, 18 bp, Artificial Sequence
  Detection primer for DNMT1
tccccatcacacctaaaa

SEQ ID NO: 419 - DNA, 18 bp, Artificial Sequence
  Detection primer for DNMT1
gggaggaggggatgtatt

SEQ ID NO: 420 - DNA, 22 bp, Artificial Sequence
  Detection primer for ESR1
agggggaattaaatagaaagag

SEQ ID NO: 421 - DNA, 22 bp, Artificial Sequence
  Detection primer for ESR1
caataaaaccatcccaaatact

SEQ ID NO: 422 - DNA, 23 bp, Artificial Sequence
  Detection primer for APAF1
agatatgtttggagattttagga

SEQ ID NO: 423 - DNA, 22 bp, Artificial Sequence
  Detection primer for APAF1
aactccccacctctaattctat

SEQ ID NO: 424 - DNA, 23 bp, Artificial Sequence
  Detection primer for HOXA5
gaagggggaaagttatttagtta

SEQ ID NO: 425 - DNA, 20 bp, Artificial Sequence
  Detection primer for HOXA5
aaaccccaaacaacctctat

SEQ ID NO: 426 - DNA, 24 bp, Artificial Sequence
  Detection primer for RASSF1
acctctctacaaattacaaattca

SEQ ID NO: 427 - DNA, 20 bp, Artificial Sequence
  Detection primer for RASSF1
agtttgggttagtttgggtt

SEQ ID NO: 428 - DNA, 18 bp, Artificial Sequence
  Detection oligonucleotide for MDR1
ttggtggtcgttttaagg

SEQ ID NO: 429 - DNA, 18 bp, Artificial Sequence
  Detection oligonucleotide for MDR1
ttggtggttgttttaagg

SEQ ID NO: 430 - DNA, 18 bp, Artificial Sequence
  Detection oligonucleotide for MDR1
ttgaaagacgtgtttata

SEQ ID NO: 431 - DNA, 18 bp, Artificial Sequence
  Detection oligonucleotide for MDR1
ttgaaagatgtgtttata

SEQ ID NO: 432 - DNA, 18 bp, Artificial Sequence
  Detection oligonucleotide for MDR1
aggtgtaacggaagttag

SEQ ID NO: 433 - DNA, 18 bp, Artificial Sequence
  Detection oligonucleotide for MDR1
aggtgtaatggaagttag

SEQ ID NO: 434 - DNA, 18 bp, Artificial Sequence
  Detection oligonucleotide for MDR1
tagtttttcgaggaatta

SEQ ID NO: 435 - DNA, 18 bp, Artificial Sequence
  Detection oligonucleotide for MDR1
tagttttttgaggaatta

SEQ ID NO: 436 - DNA, 18 bp, Artificial Sequence
  Detection oligonucleotide for APOC2
ttttaaggcgtgttagtt

SEQ ID NO: 437 - DNA, 18 bp, Artificial Sequence
  Detection oligonucleotide for APOC2
ttttaaggtgtgttagtt

SEQ ID NO: 438 - DNA, 18 bp, Artificial Sequence
  Detection oligonucleotide for APOC2
ttttgtgacgtgattttg

SEQ ID NO: 439 - DNA, 18 bp, Artificial Sequence
  Detection oligonucleotide for APOC2
ttttgtgatgtgattttg

SEQ ID NO: 440 - DNA, 18 bp, Artificial Sequence
  Detection oligonucleotide for APOC2
ttgggggacgttattgtt

SEQ ID NO: 441 - DNA, 18 bp, Artificial Sequence
  Detection oligonucleotide for APOC2
ttgggggatgttattgtt

SEQ ID NO: 442 - DNA, 18 bp, Artificial Sequence
  Detection oligonucleotide for APOC2
tgggtttgcggagaatgg

SEQ ID NO: 443 - DNA, 18 bp, Artificial Sequence
  Detection oligonucleotide for APOC2
tgggtttgtggagaatgg

SEQ ID NO: 444 - DNA, 18 bp, Artificial Sequence
  Detection oligonucleotide for CACNA1G
gtttagcgcgatttgttt

SEQ ID NO: 445 - DNA, 18 bp, Artificial Sequence
  Detection oligonucleotide for CACNA1G
gtttagtgtgatttgttt

SEQ ID NO: 446 - DNA, 18 bp, Artificial Sequence
  Detection oligonucleotide for CACNA1G
tttaggagcgttaatgtg

SEQ ID NO: 447 - DNA, 18 bp, Artificial Sequence
  Detection oligonucleotide for CACNA1G
tttaggagtgttaatgtg

SEQ ID NO: 448 - DNA, 18 bp, Artificial Sequence
  Detection oligonucleotide for CACNA1G
tagggttacgaggttagg

SEQ ID NO: 449 - DNA, 18 bp, Artificial Sequence
  Detection oligonucleotide for CACNA1G
tagggttatgaggttagg

SEQ ID NO: 450 - DNA, 18 bp, Artificial Sequence
  Detection oligonucleotide for CACNA1G
tttaggttcgtttagagt

SEQ ID NO: 451 - DNA, 18 bp, Artificial Sequence
  Detection oligonucleotide for CACNA1G
tttaggtttgtttagagt

SEQ ID NO: 452 - DNA, 18 bp, Artificial Sequence
  Detection oligonucleotide for CACNA1G
ttaggggtcgtggataaa

SEQ ID NO: 453 - DNA, 18 bp, Artificial Sequence
  Detection oligonucleotide for CACNA1G
ttaggggttgtggataaa

SEQ ID NO: 454 - DNA, 18 bp, Artificial Sequence
  Detection oligonucleotide for EGR4
ggtgggaagcgtatttat

SEQ ID NO: 455 - DNA, 18 bp, Artificial Sequence
  Detection oligonucleotide for EGR4
ggtgggaagtgtatttat

SEQ ID NO: 456 - DNA, 18 bp, Artificial Sequence
  Detection oligonucleotide for EGR4
aataataacgttatagtt

SEQ ID NO: 457 - DNA, 18 bp, Artificial Sequence
  Detection oligonucleotide for EGR4
aataataatgttatagtt

SEQ ID NO: 458 - DNA, 18 bp, Artificial Sequence
  Detection oligonucleotide for EGR4
ttatagttcgagtttttt

SEQ ID NO: 459 - DNA, 18 bp, Artificial Sequence
  Detection oligonucleotide for EGR4
ttatagtttgagtttttt

SEQ ID NO: 460 - DNA, 18 bp, Artificial Sequence
  Detection oligonucleotide for EGR4
ggagttttcggtatatat

SEQ ID NO: 461 - DNA, 18 bp, Artificial Sequence
  Detection oligonucleotide for EGR4
ggagtttttggtatatat

SEQ ID NO: 462 - DNA, 18 bp, Artificial Sequence
  Detection oligonucleotide for AR
tgttatttcgagagaggt

SEQ ID NO: 463 - DNA, 18 bp, Artificial Sequence
  Detection oligonucleotide for AR
tgttattttgagagaggt

SEQ ID NO: 464 - DNA, 18 bp, Artificial Sequence
  Detection oligonucleotide for AR
agaggttgcgttttagag

SEQ ID NO: 465 - DNA, 18 bp, Artificial Sequence
  Detection oligonucleotide for AR
agaggttgtgttttagag

SEQ ID NO: 466 - DNA, 18 bp, Artificial Sequence
  Detection oligonucleotide for AR
gtagtattcgaaggtagt

SEQ ID NO: 467 - DNA, 18 bp, Artificial Sequence
  Detection oligonucleotide for AR
gtagtatttgaaggtagt

SEQ ID NO: 468 - DNA, 18 bp, Artificial Sequence
  Detection oligonucleotide for AR
ggaggtttcgggggtttt

SEQ ID NO: 469 - DNA, 18 bp, Artificial Sequence
  Detection oligonucleotide for AR
ggaggttttgggggtttt

SEQ ID NO: 470 - DNA, 18 bp, Artificial Sequence
  Detection oligonucleotide for RB1
ttagatttcgggataggg

SEQ ID NO: 471 - DNA, 18 bp, Artificial Sequence
  Detection oligonucleotide for RB1
ttagattttgggataggg

SEQ ID NO: 472 - DNA, 18 bp, Artificial Sequence
  Detection oligonucleotide for RB1
tatagtttcgttaagtgt

SEQ ID NO: 473 - DNA, 18 bp, Artificial Sequence
  Detection oligonucleotide for RB1
tatagttttgttaagtgt

SEQ ID NO: 474 - DNA, 18 bp, Artificial Sequence
  Detection oligonucleotide for RB1
gtgtatttcggtttggag

SEQ ID NO: 475 - DNA, 18 bp, Artificial Sequence
  Detection oligonucleotide for RB1
gtgtattttggtttggag

SEQ ID NO: 476 - DNA, 18 bp, Artificial Sequence
  Detection oligonucleotide for RB1
ttggaaggcgtttggatt

SEQ ID NO: 477 - DNA, 18 bp, Artificial Sequence
  Detection oligonucleotide for RB1
ttggaaggtgtttggatt

SEQ ID NO: 478 - DNA, 18 bp, Artificial Sequence
  Detection oligonucleotide for GPIb beta
ggttaggtcgtagtattg

SEQ ID NO: 479 - DNA, 18 bp, Artificial Sequence
  Detection oligonucleotide for GPIb beta
ggttaggttgtagtattg

SEQ ID NO: 480 - DNA, 18 bp, Artificial Sequence
  Detection oligonucleotide for GPIb beta
atgggtttcggtgagttt

SEQ ID NO: 481 - DNA, 18 bp, Artificial Sequence
  Detection oligonucleotide for GPIb beta
atgggttttggtgagttt

SEQ ID NO: 482 - DNA, 18 bp, Artificial Sequence
  Detection oligonucleotide for MYOD1
atagtagtcgggtgttgg

SEQ ID NO: 483 - DNA, 18 bp, Artificial Sequence
  Detection oligonucleotide for MYOD1
atagtagttgggtgttgg

SEQ ID NO: 484 - DNA, 18 bp, Artificial Sequence
  Detection oligonucleotide for MYOD1
gtgttagtcgtttagggt

SEQ ID NO: 485 - DNA, 18 bp, Artificial Sequence
  Detection oligonucleotide for MYOD1
gtgttagttgtttagggt

SEQ ID NO: 486 - DNA, 18 bp, Artificial Sequence
  Detection oligonucleotide for MYOD1
tagttgttcgtttgggtt

SEQ ID NO: 487 - DNA, 18 bp, Artificial Sequence
  Detection oligonucleotide for MYOD1
tagttgtttgtttgggtt

SEQ ID NO: 488 - DNA, 18 bp, Artificial Sequence
  Detection oligonucleotide for MYOD1
ggttattacggataaata

SEQ ID NO: 489 - DNA, 18 bp, Artificial Sequence
  Detection oligonucleotide for MYOD1
ggttattatggataaata

SEQ ID NO: 490 - DNA, 18 bp, Artificial Sequence
  Detection oligonucleotide for WT1
attttgttcggatttatt

SEQ ID NO: 491 - DNA, 18 bp, Artificial Sequence
  Detection oligonucleotide for WT1
attttgtttggatttatt

SEQ ID NO: 492 - DNA, 18 bp, Artificial Sequence
  Detection oligonucleotide for WT1
tatttgaacggatttttt

SEQ ID NO: 493 - DNA, 18 bp, Artificial Sequence
  Detection oligonucleotide for WT1
tatttgaatggatttttt

SEQ ID NO: 494 - DNA, 18 bp, Artificial Sequence
  Detection oligonucleotide for WT1
tgttatatcggttagttg

SEQ ID NO: 495 - DNA, 18 bp, Artificial Sequence
  Detection oligonucleotide for WT1
tgttatattggttagttg

SEQ ID NO: 496 - DNA, 18 bp, Artificial Sequence
  Detection oligonucleotide for WT1
tgtttggtcgggtttggg

SEQ ID NO: 497 - DNA, 18 bp, Artificial Sequence
  Detection oligonucleotide for WT1
tgtttggttgggtttggg

SEQ ID NO: 498 - DNA, 18 bp, Artificial Sequence
  Detection oligonucleotide for HLA-F
aaaattttcgcgggttgg

SEQ ID NO: 499 - DNA, 18 bp, Artificial Sequence
  Detection oligonucleotide for HLA-F
aaaatttttgtgggttgg

SEQ ID NO: 500 - DNA, 18 bp, Artificial Sequence
  Detection oligonucleotide for HLA-F
gagagaaacggtttttgt

SEQ ID NO: 501 - DNA, 18 bp, Artificial Sequence
  Detection oligonucleotide for HLA-F
gagagaaatggtttttgt

SEQ ID NO: 502 - DNA, 18 bp, Artificial Sequence
  Detection oligonucleotide for HLA-F
gagttgtttcgtagatat

SEQ ID NO: 503 - DNA, 18 bp, Artificial Sequence
  Detection oligonucleotide for HLA-F
gagttgttttgtagatat

SEQ ID NO: 504 - DNA, 18 bp, Artificial Sequence
  Detection oligonucleotide for ELK1
tttgttttcgttgagtag

SEQ ID NO: 505 - DNA, 18 bp, Artificial Sequence
  Detection oligonucleotide for ELK1
tttgtttttgttgagtag

SEQ ID NO: 506 - DNA, 18 bp, Artificial Sequence
  Detection oligonucleotide for ELK1
tttattttcgtttttggg

SEQ ID NO: 507 - DNA, 18 bp, Artificial Sequence
  Detection oligonucleotide for ELK1
tttatttttgtttttggg

SEQ ID NO: 508 - DNA, 18 bp, Artificial Sequence
  Detection oligonucleotide for ELK1
gaagggttcgttttttaa

SEQ ID NO: 509 - DNA, 18 bp, Artificial Sequence
  Detection oligonucleotide for ELK1
gaagggtttgttttttaa

SEQ ID NO: 510 - DNA, 18 bp, Artificial Sequence
  Detection oligonucleotide for ELK1
attaatagcgttttggtt

SEQ ID NO: 511 - DNA, 18 bp, Artificial Sequence
  Detection oligonucleotide for ELK1
attaatagtgttttggtt

SEQ ID NO: 512 - DNA, 18 bp, Artificial Sequence
  Detection oligonucleotide for APC
tattagagcgttttaaag

SEQ ID NO: 513 - DNA, 18 bp, Artificial Sequence
  Detection oligonucleotide for APC
tattagagtgttttaaag

SEQ ID NO: 514 - DNA, 18 bp, Artificial Sequence
  Detection oligonucleotide for APC
gtttttttcgatttgggt

SEQ ID NO: 515 - DNA, 18 bp, Artificial Sequence
  Detection oligonucleotide for APC
gttttttttgatttgggt

SEQ ID NO: 516 - DNA, 18 bp, Artificial Sequence
  Detection oligonucleotide for ARHI
ttggttgtcgcggtagtt

SEQ ID NO: 517 - DNA, 18 bp, Artificial Sequence
  Detection oligonucleotide for ARHI
ttggttgttgtggtagtt

SEQ ID NO: 518 - DNA, 18 bp, Artificial Sequence
  Detection oligonucleotide for ARHI
tgttgttgcgtagtagaa

SEQ ID NO: 519 - DNA, 18 bp, Artificial Sequence
  Detection oligonucleotide for ARHI
tgttgttgtgtagtagaa

SEQ ID NO: 520 - DNA, 18 bp, Artificial Sequence
  Detection oligonucleotide for ARHI
gaattattcgtagttttg

SEQ ID NO: 521 - DNA, 18 bp, Artificial Sequence
  Detection oligonucleotide for ARHI
gaattatttgtagttttg

SEQ ID NO: 522 - DNA, 18 bp, Artificial Sequence
  Detection oligonucleotide for ARHI
tagaagaacgaggtttga

SEQ ID NO: 523 - DNA, 18 bp, Artificial Sequence
  Detection oligonucleotide for ARHI
tagaagaatgaggtttga

SEQ ID NO: 524 - DNA, 18 bp, Artificial Sequence
  Detection oligonucleotide for ARHI
taagtgtgcgagtttaaa

SEQ ID NO: 525 - DNA, 18 bp, Artificial Sequence
  Detection oligonucleotide for ARHI
taagtgtgtgagtttaaa

SEQ ID NO: 526 - DNA, 18 bp, Artificial Sequence
  Detection oligonucleotide for BCL2
agtgtttcgcgtgattga

SEQ ID NO: 527 - DNA, 18 bp, Artificial Sequence
  Detection oligonucleotide for BCL2
agtgttttgtgtgattga

SEQ ID NO: 528 - DNA, 18 bp, Artificial Sequence
  Detection oligonucleotide for BCL2
agttggggcgagaggtgt

SEQ ID NO: 529 - DNA, 18 bp, Artificial Sequence
  Detection oligonucleotide for BCL2
agttggggtgagaggtgt

SEQ ID NO: 530 - DNA, 18 bp, Artificial Sequence
  Detection oligonucleotide for BCL2
taagttgtcgtagagggg

SEQ ID NO: 531 - DNA, 18 bp, Artificial Sequence
  Detection oligonucleotide for BCL2
taagttgttgtagagggg

SEQ ID NO: 532 - DNA, 18 bp, Artificial Sequence
  Detection oligonucleotide for BCL2
aggggttacgagtgggat

SEQ ID NO: 533 - DNA, 18 bp, Artificial Sequence
  Detection oligonucleotide for BCL2
aggggttatgagtgggat

SEQ ID NO: 534 - DNA, 18 bp, Artificial Sequence
  Detection oligonucleotide for BCL2
aggatttcgtcgttgtag

SEQ ID NO: 535 - DNA, 18 bp, Artificial Sequence
  Detection oligonucleotide for BCL2
aggattttgttgttgtag

SEQ ID NO: 536 - DNA, 18 bp, Artificial Sequence
  Detection oligonucleotide for BRCA1
tggattttcgtgagaatt

SEQ ID NO: 537 - DNA, 18 bp, Artificial Sequence
  Detection oligonucleotide for BRCA1
tggatttttgtgagaatt

SEQ ID NO: 538 - DNA, 18 bp, Artificial Sequence
  Detection oligonucleotide for BRCA1
attgtgttcgttttggta

SEQ ID NO: 539 - DNA, 18 bp, Artificial Sequence
  Detection oligonucleotide for BRCA1
attgtgtttgttttggta

SEQ ID NO: 540 - DNA, 18 bp, Artificial Sequence
  Detection oligonucleotide for BRCA1
tattgtggcgaagatttt

SEQ ID NO: 541 - DNA, 18 bp, Artificial Sequence
  Detection oligonucleotide for BRCA1
tattgtggtgaagatttt

SEQ ID NO: 542 - DNA, 18 bp, Artificial Sequence
  Detection oligonucleotide for BRCA1
taataagtcgtaattgga

SEQ ID NO: 543 - DNA, 18 bp, Artificial Sequence
  Detection oligonucleotide for BRCA1
taataagttgtaattgga

SEQ ID NO: 544 - DNA, 18 bp, Artificial Sequence
  Detection oligonucleotide for CALCA
gagggtgacgtaatttag

SEQ ID NO: 545 - DNA, 18 bp, Artificial Sequence
  Detection oligonucleotide for CALCA
gagggtgatgtaatttag

SEQ ID NO: 546 - DNA, 18 bp, Artificial Sequence
  Detection oligonucleotide for CALCA
tgtattggcggaattttt

SEQ ID NO: 547 - DNA, 18 bp, Artificial Sequence
  Detection oligonucleotide for CALCA
tgtattggtggaattttt

SEQ ID NO: 548 - DNA, 18 bp, Artificial Sequence
  Detection oligonucleotide for CALCA
atttatagcggcgggaat

SEQ ID NO: 549 - DNA, 18 bp, Artificial Sequence
  Detection oligonucleotide for CALCA
atttatagtggtgggaat

SEQ ID NO: 550 - DNA, 18 bp, Artificial Sequence
  Detection oligonucleotide for CALCA
tgttagttcgcgatttat

SEQ ID NO: 551 - DNA, 18 bp, Artificial Sequence
  Detection oligonucleotide for CALCA
tgttagtttgtgatttat

SEQ ID NO: 552 - DNA, 18 bp, Artificial Sequence
  Detection oligonucleotide for CALCA
ggttggatcggatagttt

SEQ ID NO: 553 - DNA, 18 bp, Artificial Sequence
  Detection oligonucleotide for CALCA
ggttggattggatagttt

SEQ ID NO: 554 - DNA, 18 bp, Artificial Sequence
  Detection oligonucleotide for CCND2
tttaataacgagagggga

SEQ ID NO: 555 - DNA, 18 bp, Artificial Sequence
  Detection oligonucleotide for CCND2
tttaataatgagagggga

SEQ ID NO: 556 - DNA, 18 bp, Artificial Sequence
  Detection oligonucleotide for CCND2
ttagtttgcgttatcgtt

SEQ ID NO: 557 - DNA, 18 bp, Artificial Sequence
  Detection oligonucleotide for CCND2
ttagtttgtgttattgtt

SEQ ID NO: 558 - DNA, 18 bp, Artificial Sequence
  Detection oligonucleotide for CCND2
ttttagagcggagaagag

SEQ ID NO: 559 - DNA, 18 bp, Artificial Sequence
  Detection oligonucleotide for CCND2
ttttagagtggagaagag

SEQ ID NO: 560 - DNA, 18 bp, Artificial Sequence
  Detection oligonucleotide for CCND2
ggtagtttcgaggttttg

SEQ ID NO: 561 - DNA, 18 bp, Artificial Sequence
  Detection oligonucleotide for CCND2
ggtagttttgaggttttg

SEQ ID NO: 562 - DNA, 18 bp, Artificial Sequence
  Detection oligonucleotide for CDH1
agggggtgcgtggttgta

SEQ ID NO: 563 - DNA, 18 bp, Artificial Sequence
  Detection oligonucleotide for CDH1
agggggtgtgtggttgta

SEQ ID NO: 564 - DNA, 18 bp, Artificial Sequence
  Detection oligonucleotide for CDH1
agtttcgacgttattgag

SEQ ID NO: 565 - DNA, 18 bp, Artificial Sequence
  Detection oligonucleotide for CDH1
agttttgatgttattgag

SEQ ID NO: 566 - DNA, 18 bp, Artificial Sequence
  Detection oligonucleotide for CDH1
agaggttgcggttttaag

SEQ ID NO: 567 - DNA, 18 bp, Artificial Sequence
  Detection oligonucleotide for CDH1
agaggttgtggttttaag

SEQ ID NO: 568 - DNA, 18 bp, Artificial Sequence
  Detection oligonucleotide for CDH1
aggggattcggggtattt

SEQ ID NO: 569 - DNA, 18 bp, Artificial Sequence
  Detection oligonucleotide for CDH1
aggggatttggggtattt

SEQ ID NO: 570 - DNA, 18 bp, Artificial Sequence
  Detection oligonucleotide for CDKN1B
aagagaaacgttggaata

SEQ ID NO: 571 - DNA, 18 bp, Artificial Sequence
  Detection oligonucleotide for CDKN1B
aagagaaatgttggaata

SEQ ID NO: 572 - DNA, 18 bp, Artificial Sequence
  Detection oligonucleotide for CDKN1B
gtatttggcggttggatt

SEQ ID NO: 573 - DNA, 18 bp, Artificial Sequence
  Detection oligonucleotide for CDKN1B
gtatttggtggttggatt

SEQ ID NO: 574 - DNA, 18 bp, Artificial Sequence
  Detection oligonucleotide for CDKN1B
tataatttcgggaaagaa

SEQ ID NO: 575 - DNA, 18 bp, Artificial Sequence
  Detection oligonucleotide for CDKN1B
tataattttgggaaagaa

SEQ ID NO: 576 - DNA, 18 bp, Artificial Sequence
  Detection oligonucleotide for CDKN2a
agagtgaacgtatttaaa

SEQ ID NO: 577 - DNA, 18 bp, Artificial Sequence
  Detection oligonucleotide for CDKN2a
agagtgaatgtatttaaa

SEQ ID NO: 578 - DNA, 18 bp, Artificial Sequence
  Detection oligonucleotide for CDKN2a
gttatattcgttaagtgt

SEQ ID NO: 579 - DNA, 18 bp, Artificial Sequence
  Detection oligonucleotide for CDKN2a
gttatatttgttaagtgt

SEQ ID NO: 580 - DNA, 18 bp, Artificial Sequence
  Detection oligonucleotide for CDKN2a
taagtgttcggagttaat

SEQ ID NO: 581 - DNA, 18 bp, Artificial Sequence
  Detection oligonucleotide for CDKN2a
taagtgtttggagttaat

SEQ ID NO: 582 - DNA, 18 bp, Artificial Sequence
  Detection oligonucleotide for CDKN2a
gttagtatcggaggaaga

SEQ ID NO: 583 - DNA, 18 bp, Artificial Sequence
  Detection oligonucleotide for CDKN2a
gttagtattggaggaaga

SEQ ID NO: 584 - DNA, 18 bp, Artificial Sequence
  Detection oligonucleotide for CDKN2a
ttgtttaacgtatcgaat

SEQ ID NO: 585 - DNA, 18 bp, Artificial Sequence
  Detection oligonucleotide for CDKN2a
ttgtttaatgtattgaat

SEQ ID NO: 586 - DNA, 18 bp, Artificial Sequence
  Detection oligonucleotide for CDKN2a
aatagttacggtcggagg

SEQ ID NO: 587 - DNA, 18 bp, Artificial Sequence
  Detection oligonucleotide for CDKN2a
aatagttatggttggagg

SEQ ID NO: 588 - DNA, 18 bp, Artificial Sequence
  Detection oligonucleotide for CDKN2B
atatttagcgagtagtgt

SEQ ID NO: 589 - DNA, 18 bp, Artificial Sequence
  Detection oligonucleotide for CDKN2B
atatttagtgagtagtgt

SEQ ID NO: 590 - DNA, 18 bp, Artificial Sequence
  Detection oligonucleotide for CDKN2B
tggggagacgtcggtttt

SEQ ID NO: 591 - DNA, 18 bp, Artificial Sequence
  Detection oligonucleotide for CDKN2B
tggggagatgttggtttt

SEQ ID NO: 592 - DNA, 18 bp, Artificial Sequence
  Detection oligonucleotide for CDKN2B
ttattgtacggggtttta

SEQ ID NO: 593 - DNA, 18 bp, Artificial Sequence
  Detection oligonucleotide for CDKN2B
ttattgtatggggtttta

SEQ ID NO: 594 - DNA, 18 bp, Artificial Sequence
  Detection oligonucleotide for CDKN2B
tagaaggacgacgggagg

SEQ ID NO: 595 - DNA, 18 bp, Artificial Sequence
  Detection oligonucleotide for CDKN2B
tagaaggatgatgggagg

SEQ ID NO: 596 - DNA, 18 bp, Artificial Sequence
  Detection oligonucleotide for CDKN2B
agagagtgcgtcggagta

SEQ ID NO: 597 - DNA, 18 bp, Artificial Sequence
  Detection oligonucleotide for CDKN2B
agagagtgtgttggagta

SEQ ID NO: 598 - DNA, 18 bp, Artificial Sequence
  Detection oligonucleotide for CD44
gtggggttcggaggtata

SEQ ID NO: 599 - DNA, 18 bp, Artificial Sequence
  Detection oligonucleotide for CD44
gtggggtttggaggtata

SEQ ID NO: 600 - DNA, 18 bp, Artificial Sequence
  Detection oligonucleotide for CD44
aggtatttcgcgatattt

SEQ ID NO: 601 - DNA, 18 bp, Artificial Sequence
  Detection oligonucleotide for CD44
aggtattttgtgatattt

SEQ ID NO: 602 - DNA, 18 bp, Artificial Sequence
  Detection oligonucleotide for CD44
ttgtttagcggattttag

SEQ ID NO: 603 - DNA, 18 bp, Artificial Sequence
  Detection oligonucleotide for CD44
ttgtttagtggattttag

SEQ ID NO: 604 - DNA, 18 bp, Artificial Sequence
  Detection oligonucleotide for CD44
tggtggtacgtagtttgg

SEQ ID NO: 605 - DNA, 18 bp, Artificial Sequence
  Detection oligonucleotide for CD44
tggtggtatgtagtttgg

SEQ ID NO: 606 - DNA, 18 bp, Artificial Sequence
  Detection oligonucleotide for CD44
tgagtgttcgtcgtagtt

SEQ ID NO: 607 - DNA, 18 bp, Artificial Sequence
  Detection oligonucleotide for CD44
tgagtgtttgtcgtagtt

SEQ ID NO: 608 - DNA, 18 bp, Artificial Sequence
  Detection oligonucleotide for CSPG2
aagattttcggttagttt

SEQ ID NO: 609 - DNA, 18 bp, Artificial Sequence
  Detection oligonucleotide for CSPG2
aagatttttggttagttt

SEQ ID NO: 610 - DNA, 18 bp, Artificial Sequence
  Detection oligonucleotide for CSPG2
atgtgattcgtttgggta

SEQ ID NO: 611 - DNA, 18 bp, Artificial Sequence
  Detection oligonucleotide for CSPG2
atgtgatttgtttgggta

SEQ ID NO: 612 - DNA, 18 bp, Artificial Sequence
  Detection oligonucleotide for CSPG2
gggtaacgtcgaatttag

SEQ ID NO: 613 - DNA, 18 bp, Artificial Sequence
  Detection oligonucleotide for CSPG2
gggtaatgttgaatttag

SEQ ID NO: 614 - DNA, 18 bp, Artificial Sequence
  Detection oligonucleotide for CSPG2
aaaaattcgcgagtttag

SEQ ID NO: 615 - DNA, 18 bp, Artificial Sequence
  Detection oligonucleotide for CSPG2
aaaaatttgtgagtttag

SEQ ID NO: 616 - DNA, 18 bp, Artificial Sequence
  Detection oligonucleotide for DAPK1
gttggagtcgaggtttga

SEQ ID NO: 617 - DNA, 18 bp, Artificial Sequence
  Detection oligonucleotide for DAPK1
gttggagttgaggtttga

SEQ ID NO: 618 - DNA, 18 bp, Artificial Sequence
  Detection oligonucleotide for DAPK1
ttttttgtcggattggtg

SEQ ID NO: 619 - DNA, 18 bp, Artificial Sequence
  Detection oligonucleotide for DAPK1
ttttttgttggattggtg

SEQ ID NO: 620 - DNA, 18 bp, Artificial Sequence
  Detection oligonucleotide for DAPK1
gaagggagcgtattttat

SEQ ID NO: 621 - DNA, 18 bp, Artificial Sequence
  Detection oligonucleotide for DAPK1
gaagggagtgtattttat

SEQ ID NO: 622 - DNA, 18 bp, Artificial Sequence
  Detection oligonucleotide for DAPK1
ttgtttttcggaaatttg

SEQ ID NO: 623 - DNA, 18 bp, Artificial Sequence
  Detection oligonucleotide for DAPK1
ttgttttttggaaatttg

SEQ ID NO: 624 - DNA, 18 bp, Artificial Sequence
  Detection oligonucleotide for GGT1
ataggtggcgtttggatt

SEQ ID NO: 625 - DNA, 18 bp, Artificial Sequence
  Detection oligonucleotide for GGT1
ataggtggtgtttggatt

SEQ ID NO: 626 - DNA, 18 bp, Artificial Sequence
  Detection oligonucleotide for GGT1
gggtggtgcgttgttgta

SEQ ID NO: 627 - DNA, 18 bp, Artificial Sequence
  Detection oligonucleotide for GGT1
gggtggtgtgttgttgta

SEQ ID NO: 628 - DNA, 18 bp, Artificial Sequence
  Detection oligonucleotide for GGT1
tatattatcggttttagg

SEQ ID NO: 629 - DNA, 18 bp, Artificial Sequence
  Detection oligonucleotide for GGT1
tatattattggttttagg

SEQ ID NO: 630 - DNA, 18 bp, Artificial Sequence
  Detection oligonucleotide for GGT1
aggttagacgttttgtat

SEQ ID NO: 631 - DNA, 18 bp, Artificial Sequence
  Detection oligonucleotide for GGT1
aggttagatgttttgtat

SEQ ID NO: 632 - DNA, 18 bp, Artificial Sequence
  Detection oligonucleotide for GSTP1
ggttttttcggttagttg

SEQ ID NO: 633 - DNA, 18 bp, Artificial Sequence
  Detection oligonucleotide for GSTP1
ggtttttttggttagttg

SEQ ID NO: 634 - DNA, 18 bp, Artificial Sequence
  Detection oligonucleotide for GSTP1
ttttagggcgtttttttg

SEQ ID NO: 635 - DNA, 18 bp, Artificial Sequence
  Detection oligonucleotide for GSTP1
ttttagggtgtttttttg

SEQ ID NO: 636 - DNA, 18 bp, Artificial Sequence
  Detection oligonucleotide for GSTP1
gtagttttcgttattagt

SEQ ID NO: 637 - DNA, 18 bp, Artificial Sequence
  Detection oligonucleotide for GSTP1
gtagtttttgttattagt

SEQ ID NO: 638 - DNA, 18 bp, Artificial Sequence
  Detection oligonucleotide for HIC-1
atgattcgtcgtgggttt

SEQ ID NO: 639 - DNA, 18 bp, Artificial Sequence
  Detection oligonucleotide for HIC-1
atgatttgttgtgggttt

SEQ ID NO: 640 - DNA, 18 bp, Artificial Sequence
  Detection oligonucleotide for HIC-1
aggagattcgaaagttta

SEQ ID NO: 641 - DNA, 18 bp, Artificial Sequence
  Detection oligonucleotide for HIC-1
aggagatttgaaagttta

SEQ ID NO: 642 - DNA, 18 bp, Artificial Sequence
  Detection oligonucleotide for HIC-1
gggttttacgtggttgtt

SEQ ID NO: 643 - DNA, 18 bp, Artificial Sequence
  Detection oligonucleotide for HIC-1
gggttttatgtggttgtt

SEQ ID NO: 644 - DNA, 18 bp, Artificial Sequence
  Detection oligonucleotide for HIC-1
ttttagagcgttagggtt

SEQ ID NO: 645 - DNA, 18 bp, Artificial Sequence
  Detection oligonucleotide for HIC-1
ttttagagtgttagggtt

SEQ ID NO: 646 - DNA, 18 bp, Artificial Sequence
  Detection oligonucleotide for LAP18
attaaaggcgattaaatt

SEQ ID NO: 647 - DNA, 18 bp, Artificial Sequence
  Detection oligonucleotide for LAP18
attaaaggtgattaaatt

SEQ ID NO: 648 - DNA, 18 bp, Artificial Sequence
  Detection oligonucleotide for LAP18
ggtaagaacgtatatagt

SEQ ID NO: 649 - DNA, 18 bp, Artificial Sequence
  Detection oligonucleotide for LAP18
ggtaagaatgtatatagt

SEQ ID NO: 650 - DNA, 18 bp, Artificial Sequence
  Detection oligonucleotide for LAP18
agaaattacgatgatgtt

SEQ ID NO: 651 - DNA, 18 bp, Artificial Sequence
  Detection oligonucleotide for LAP18
agaaattatgatgatgtt

SEQ ID NO: 652 - DNA, 18 bp, Artificial Sequence
  Detection oligonucleotide for LAP18
gtgggtggcgtattagaa

SEQ ID NO: 653 - DNA, 18 bp, Artificial Sequence
  Detection oligonucleotide for LAP18
gtgggtggtgtattagaa

SEQ ID NO: 654 - DNA, 18 bp, Artificial Sequence
  Detection oligonucleotide for LKB1
gggttaagcgtcgattaa

SEQ ID NO: 655 - DNA, 18 bp, Artificial Sequence
  Detection oligonucleotide for LKB1
gggttaagtgttgattaa

SEQ ID NO: 656 - DNA, 18 bp, Artificial Sequence
  Detection oligonucleotide for LKB1
tagagggtcggggatggt

SEQ ID NO: 657 - DNA, 18 bp, Artificial Sequence
  Detection oligonucleotide for LKB1
tagagggttggggatggt

SEQ ID NO: 658 - DNA, 18 bp, Artificial Sequence
  Detection oligonucleotide for LKB1
tttaggttcgtaagttta

SEQ ID NO: 659 - DNA, 18 bp, Artificial Sequence
  Detection oligonucleotide for LKB1
tttaggtttgtaagttta

SEQ ID NO: 660 - DNA, 18 bp, Artificial Sequence
  Detection oligonucleotide for LKB1
ttaatgagcgcgttgtat

SEQ ID NO: 661 - DNA, 18 bp, Artificial Sequence
  Detection oligonucleotide for LKB1
ttaatgagtgcgttgtat

SEQ ID NO: 662 - DNA, 18 bp, Artificial Sequence
  Detection oligonucleotide for LOC51147
tttagtgacgagaaggtt

SEQ ID NO: 663 - DNA, 18 bp, Artificial Sequence
  Detection oligonucleotide for LOC51147
tttagtgatgagaaggtt

SEQ ID NO: 664 - DNA, 18 bp, Artificial Sequence
  Detection oligonucleotide for LOC51147
ttatgaagcggttttgtg

SEQ ID NO: 665 - DNA, 18 bp, Artificial Sequence
  Detection oligonucleotide for LOC51147
ttatgaagtggttttgtg

SEQ ID NO: 666 - DNA, 18 bp, Artificial Sequence
  Detection oligonucleotide for LOC51147
gtagtaggatcgaggttt

SEQ ID NO: 667 - DNA, 18 bp, Artificial Sequence
  Detection oligonucleotide for LOC51147
gtagtaggattgaggttt

SEQ ID NO: 668 - DNA, 18 bp, Artificial Sequence
  Detection oligonucleotide for LOC51147
gttagagacgtgttttga

SEQ ID NO: 669 - DNA, 18 bp, Artificial Sequence
  Detection oligonucleotide for LOC51147
gttagagatgtgttttga

SEQ ID NO: 670 - DNA, 18 bp, Artificial Sequence
  Detection oligonucleotide for MGMT
taaggatacgagttatat

SEQ ID NO: 671 - DNA, 18 bp, Artificial Sequence
  Detection oligonucleotide for MGMT
taaggatatgagttatat

SEQ ID NO: 672 - DNA, 18 bp, Artificial Sequence
  Detection oligonucleotide for MGMT
ttggagagcggttgagtt

SEQ ID NO: 673 - DNA, 18 bp, Artificial Sequence
  Detection oligonucleotide for MGMT
ttggagagtggttgagtt

SEQ ID NO: 674 - DNA, 18 bp, Artificial Sequence
  Detection oligonucleotide for MGMT
agtaggatcgggattttt

SEQ ID NO: 675 - DNA, 18 bp, Artificial Sequence
  Detection oligonucleotide for MGMT
agtaggattgggattttt

SEQ ID NO: 676 - DNA, 18 bp, Artificial Sequence
  Detection oligonucleotide for MLH1
ttgagaagcgttaagtat

SEQ ID NO: 677 - DNA, 18 bp, Artificial Sequence
  Detection oligonucleotide for MLH1
ttgagaagtgttaagtat

SEQ ID NO: 678 - DNA, 18 bp, Artificial Sequence
  Detection oligonucleotide for MLH1
ttaggtagcgggtagtag

SEQ ID NO: 679 - DNA, 18 bp, Artificial Sequence
  Detection oligonucleotide for MLH1
ttaggtagtgggtagtag

SEQ ID NO: 680 - DNA, 18 bp, Artificial Sequence
  Detection oligonucleotide for MLH1
gtagtagtcgttttaggg

SEQ ID NO: 681 - DNA, 18 bp, Artificial Sequence
  Detection oligonucleotide for MLH1
gtagtagttgttttaggg

SEQ ID NO: 682 - DNA, 18 bp, Artificial Sequence
  Detection oligonucleotide for MLH1
atagttgtcgttgaaggg

SEQ ID NO: 683 - DNA, 18 bp, Artificial Sequence
  Detection oligonucleotide for MLH1
atagttgttgttgaaggg

SEQ ID NO: 684 - DNA, 18 bp, Artificial Sequence
  Detection oligonucleotide for MLH1
gggttattcggcggttgg

SEQ ID NO: 685 - DNA, 18 bp, Artificial Sequence
  Detection oligonucleotide for MLH1
gggttatttggtggttgg

SEQ ID NO: 686 - DNA, 18 bp, Artificial Sequence
  Detection oligonucleotide for MNCA9
taaaagggcgttttgtga

SEQ ID NO: 687 - DNA, 18 bp, Artificial Sequence
  Detection oligonucleotide for MNCA9
taaaagggtgttttgtga

SEQ ID NO: 688 - DNA, 18 bp, Artificial Sequence
  Detection oligonucleotide for MNCA9
ttaatgtacgtatagttc

SEQ ID NO: 689 - DNA, 18 bp, Artificial Sequence
  Detection oligonucleotide for MNCA9
ttaatgtatgtatagttc

SEQ ID NO: 690 - DNA, 18 bp, Artificial Sequence
  Detection oligonucleotide for MNCA9
gtatatatcgtgtgttgg

SEQ ID NO: 691 - DNA, 18 bp, Artificial Sequence
  Detection oligonucleotide for MNCA9
gtatatattgtgtgttgg

SEQ ID NO: 692 - DNA, 18 bp, Artificial Sequence
  Detection oligonucleotide for MNCA9
tagttagtcgtatggttt

SEQ ID NO: 693 - DNA, 18 bp, Artificial Sequence
  Detection oligonucleotide for MNCA9
tagttagttgtatggttt

SEQ ID NO: 694 - DNA, 18 bp, Artificial Sequence
  Detection oligonucleotide for MYC
ttagagtgttcggttgtt

SEQ ID NO: 695 - DNA, 18 bp, Artificial Sequence
  Detection oligonucleotide for MYC
ttagagtgtttggttgtt

SEQ ID NO: 696 - DNA, 18 bp, Artificial Sequence
  Detection oligonucleotide for MYC
aggattttcgagttgtgt

SEQ ID NO: 697 - DNA, 18 bp, Artificial Sequence
  Detection oligonucleotide for MYC
aggatttttgagttgtgt

SEQ ID NO: 698 - DNA, 18 bp, Artificial Sequence
  Detection oligonucleotide for MYC
aattttagcgagaggtag

SEQ ID NO: 699 - DNA, 18 bp, Artificial Sequence
  Detection oligonucleotide for MYC
aattttagtgagaggtag

SEQ ID NO: 700 - DNA, 18 bp, Artificial Sequence
  Detection oligonucleotide for MYC
ttgtgggcgttttgggaa

SEQ ID NO: 701 - DNA, 18 bp, Artificial Sequence
  Detection oligonucleotide for MYC
ttgtgggtgttttgggaa

SEQ ID NO: 702 - DNA, 18 bp, Artificial Sequence
  Detection oligonucleotide for N33
gtgaatcggatgttttgt

SEQ ID NO: 703 - DNA, 18 bp, Artificial Sequence
  Detection oligonucleotide for N33
gtgaattggatgttttgt

SEQ ID NO: 704 - DNA, 18 bp, Artificial Sequence
  Detection oligonucleotide for N33
gtttagttagcgggtttt

SEQ ID NO: 705 - DNA, 18 bp, Artificial Sequence
  Detection oligonucleotide for N33
gtttagttagtgggtttt

SEQ ID NO: 706 - DNA, 18 bp, Artificial Sequence
  Detection oligonucleotide for N33
gttttgtcgcgatggggg

SEQ ID NO: 707 - DNA, 18 bp, Artificial Sequence
  Detection oligonucleotide for N33
gttttgttgtgatggggg

SEQ ID NO: 708 - DNA, 18 bp, Artificial Sequence
  Detection oligonucleotide for N33
atttagttcgggggagga

SEQ ID NO: 709 - DNA, 18 bp, Artificial Sequence
  Detection oligonucleotide for N33
atttagtttgggggagga

SEQ ID NO: 710 - DNA, 18 bp, Artificial Sequence
  Detection oligonucleotide for PAX6
tttttggtcgtagggttg

SEQ ID NO: 711 - DNA, 18 bp, Artificial Sequence
  Detection oligonucleotide for PAX6
tttttggttgtagggttg

SEQ ID NO: 712 - DNA, 18 bp, Artificial Sequence
  Detection oligonucleotide for PAX6
tttaggtcgcgtagattt

SEQ ID NO: 713 - DNA, 18 bp, Artificial Sequence
  Detection oligonucleotide for PAX6
tttaggttgtgtagattt

SEQ ID NO: 714 - DNA, 18 bp, Artificial Sequence
  Detection oligonucleotide for PAX6
agagtttagcgtattttt

SEQ ID NO: 715 - DNA, 18 bp, Artificial Sequence
  Detection oligonucleotide for PAX6
agagtttagtgtattttt

SEQ ID NO: 716 - DNA, 18 bp, Artificial Sequence
  Detection oligonucleotide for PGR
aaggagtcgcgtgttatt

SEQ ID NO: 717 - DNA, 18 bp, Artificial Sequence
  Detection oligonucleotide for PGR
aaggagttgtgtgttatt

SEQ ID NO: 718 - DNA, 18 bp, Artificial Sequence
  Detection oligonucleotide for PGR
ttaagtgtcggatttgtg

SEQ ID NO: 719 - DNA, 18 bp, Artificial Sequence
  Detection oligonucleotide for PGR
ttaagtgttggatttgtg

SEQ ID NO: 720 - DNA, 18 bp, Artificial Sequence
  Detection oligonucleotide for PGR
ttagttttcggatagaag

SEQ ID NO: 721 - DNA, 18 bp, Artificial Sequence
  Detection oligonucleotide for PGR
ttagtttttggatagaag

SEQ ID NO: 722 - DNA, 18 bp, Artificial Sequence
  Detection oligonucleotide for PGR
gggataaacgatagttat

SEQ ID NO: 723 - DNA, 18 bp, Artificial Sequence
  Detection oligonucleotide for PGR
gggataaatgatagttat

SEQ ID NO: 724 - DNA, 18 bp, Artificial Sequence
  Detection oligonucleotide for PTEN
ggattttgcgttcgtatt

SEQ ID NO: 725 - DNA, 18 bp, Artificial Sequence
  Detection oligonucleotide for PTEN
ggattttgtgtttgtatt

SEQ ID NO: 726 - DNA, 18 bp, Artificial Sequence
  Detection oligonucleotide for PTEN
agagttatcgttttgttt

SEQ ID NO: 727 - DNA, 18 bp, Artificial Sequence
  Detection oligonucleotide for PTEN
agagttattgttttgttt

SEQ ID NO: 728 - DNA, 18 bp, Artificial Sequence
  Detection oligonucleotide for PTEN
tgatgtggcgggattttt

SEQ ID NO: 729 - DNA, 18 bp, Artificial Sequence
  Detection oligonucleotide for PTEN
tgatgtggtgggattttt

SEQ ID NO: 730 - DNA, 18 bp, Artificial Sequence
  Detection oligonucleotide for PTEN
tttttatgcgttgcggta

SEQ ID NO: 731 - DNA, 18 bp, Artificial Sequence
  Detection oligonucleotide for PTEN
tttttatgtgttgtggta

SEQ ID NO: 732 - DNA, 18 bp, Artificial Sequence
  Detection oligonucleotide for RARB
gggtttatcgaaagttta

SEQ ID NO: 733 - DNA, 18 bp, Artificial Sequence
  Detection oligonucleotide for RARB
gggtttattgaaagttta

SEQ ID NO: 734 - DNA, 18 bp, Artificial Sequence
  Detection oligonucleotide for RARB
tttttatgcgagttgttt

SEQ ID NO: 735 - DNA, 18 bp, Artificial Sequence
  Detection oligonucleotide for RARB
tttttatgtgagttgttt

SEQ ID NO: 736 - DNA, 18 bp, Artificial Sequence
  Detection oligonucleotide for RARB
ttgggtatcgtcggggta

SEQ ID NO: 737 - DNA, 18 bp, Artificial Sequence
  Detection oligonucleotide for RARB
ttgggtattgttggggta

SEQ ID NO: 738 - DNA, 18 bp, Artificial Sequence
  Detection oligonucleotide for SFN
atagagttcggtattggt

SEQ ID NO: 739 - DNA, 18 bp, Artificial Sequence
  Detection oligonucleotide for SFN
atagagtttggtattggt

SEQ ID NO: 740 - DNA, 18 bp, Artificial Sequence
  Detection oligonucleotide for SFN
ttttagggcgtgtgcgat

SEQ ID NO: 741 - DNA, 18 bp, Artificial Sequence
  Detection oligonucleotide for SFN
ttttagggtgtgtgtgat

SEQ ID NO: 742 - DNA, 18 bp, Artificial Sequence
  Detection oligonucleotide for S100A2
tttaattgcggttgtgtg

SEQ ID NO: 743 - DNA, 18 bp, Artificial Sequence
  Detection oligonucleotide for S100A2
tttaattgtggttgtgtg

SEQ ID NO: 744 - DNA, 18 bp, Artificial Sequence
  Detection oligonucleotide for S100A2
tatataggcgtatgtatg

SEQ ID NO: 745 - DNA, 18 bp, Artificial Sequence
  Detection oligonucleotide for S100A2
tatataggtgtatgtatg

SEQ ID NO: 746 - DNA, 18 bp, Artificial Sequence
  Detection oligonucleotide for S100A2
tatgtatacgagtattgg

SEQ ID NO: 747 - DNA, 18 bp, Artificial Sequence
  Detection oligonucleotide for S100A2
tatgtatatgagtattgg

SEQ ID NO: 748 - DNA, 18 bp, Artificial Sequence
  Detection oligonucleotide for S100A2
agttttagcgtgtgttta

SEQ ID NO: 749 - DNA, 18 bp, Artificial Sequence
  Detection oligonucleotide for S100A2
agttttagtgtgtgttta

SEQ ID NO: 750 - DNA, 18 bp, Artificial Sequence
  Detection oligonucleotide for TFF1
gatagagacgtgtatagt

SEQ ID NO: 751 - DNA, 18 bp, Artificial Sequence
  Detection oligonucleotide for TFF1
gatagagatgtgtatagt

SEQ ID NO: 752 - DNA, 18 bp, Artificial Sequence
  Detection oligonucleotide for TFF1
tggtttttcgtgaaagat

SEQ ID NO: 753 - DNA, 18 bp, Artificial Sequence
  Detection oligonucleotide for TFF1
tggttttttgtgaaagat

SEQ ID NO: 754 - DNA, 18 bp, Artificial Sequence
  Detection oligonucleotide for TFF1
ttggttttcggtattttg

SEQ ID NO: 755 - DNA, 18 bp, Artificial Sequence
  Detection oligonucleotide for TFF1
ttggtttttggtattttg

SEQ ID NO: 756 - DNA, 18 bp, Artificial Sequence
  Detection oligonucleotide for TGFBR2
atttggagcgaggaattt

SEQ ID NO: 757 - DNA, 18 bp, Artificial Sequence
  Detection oligonucleotide for TGFBR2
atttggagtgaggaattt

SEQ ID NO: 758 - DNA, 18 bp, Artificial Sequence
  Detection oligonucleotide for TGFBR2
ttgaaagtcggttaaagt

SEQ ID NO: 759 - DNA, 18 bp, Artificial Sequence
  Detection oligonucleotide for TGFBR2
ttgaaagttggttaaagt

SEQ ID NO: 760 - DNA, 18 bp, Artificial Sequence
  Detection oligonucleotide for TGFBR2
aaagttttcggaggggtt

SEQ ID NO: 761 - DNA, 18 bp, Artificial Sequence
  Detection oligonucleotide for TGFBR2
aaagtttttggaggggtt

SEQ ID NO: 762 - DNA, 18 bp, Artificial Sequence
  Detection oligonucleotide for TGFBR2
ggtagttacgagagagtt

SEQ ID NO: 763 - DNA, 18 bp, Artificial Sequence
  Detection oligonucleotide for TGFBR2
ggtagttatgagagagtt

SEQ ID NO: 764 - DNA, 18 bp, Artificial Sequence
  Detection oligonucleotide for TGFBR2
gttggacgtcgaggagag

SEQ ID NO: 765 - DNA, 18 bp, Artificial Sequence
  Detection oligonucleotide for TGFBR2
gttggatgttgaggagag

SEQ ID NO: 766 - DNA, 18 bp, Artificial Sequence
  Detection oligonucleotide for TIMP3
aggtttttcgttggagaa

SEQ ID NO: 767 - DNA, 18 bp, Artificial Sequence
  Detection oligonucleotide for TIMP3
aggttttttgttggagaa

SEQ ID NO: 768 - DNA, 18 bp, Artificial Sequence
  Detection oligonucleotide for TIMP3
gaaaatatcggtattttg

SEQ ID NO: 769 - DNA, 18 bp, Artificial Sequence
  Detection oligonucleotide for TIMP3
gaaaatattggtattttg

SEQ ID NO: 770 - DNA, 18 bp, Artificial Sequence
  Detection oligonucleotide for TIMP3
atgtggggcgcggggata

SEQ ID NO: 771 - DNA, 18 bp, Artificial Sequence
  Detection oligonucleotide for TIMP3
atgtggggtgtggggata

SEQ ID NO: 772 - DNA, 18 bp, Artificial Sequence
  Detection oligonucleotide for TIMP3
gggataagcgaatttttt

SEQ ID NO: 773 - DNA, 18 bp, Artificial Sequence
  Detection oligonucleotide for TIMP3
gggataagtgaatttttt

SEQ ID NO: 774 - DNA, 18 bp, Artificial Sequence
  Detection oligonucleotide for VHL
tttataagcgtgatgatt

SEQ ID NO: 775 - DNA, 18 bp, Artificial Sequence
  Detection oligonucleotide for VHL
tttataagtgtgatgatt

SEQ ID NO: 776 - DNA, 18 bp, Artificial Sequence
  Detection oligonucleotide for VHL
gtatattgcgcgtttgat

SEQ ID NO: 777 - DNA, 18 bp, Artificial Sequence
  Detection oligonucleotide for VHL
gtatattgtgtgtttgat

SEQ ID NO: 778 - DNA, 18 bp, Artificial Sequence
  Detection oligonucleotide for CDKN1C
ttaagttacggttattag

SEQ ID NO: 779 - DNA, 18 bp, Artificial Sequence
  Detection oligonucleotide for CDKN1C
ttaagttatggttattag

SEQ ID NO: 780 - DNA, 18 bp, Artificial Sequence
  Detection oligonucleotide for CDKN1C
ttagtgttcgtttggaat

SEQ ID NO: 781 - DNA, 18 bp, Artificial Sequence
  Detection oligonucleotide for CDKN1C
ttagtgtttgtttggaat

SEQ ID NO: 782 - DNA, 18 bp, Artificial Sequence
  Detection oligonucleotide for CAV1
ttggtatcgttgaagaat

SEQ ID NO: 783 - DNA, 18 bp, Artificial Sequence
  Detection oligonucleotide for CAV1
ttggtattgttgaagaat

SEQ ID NO: 784 - DNA, 18 bp, Artificial Sequence
  Detection oligonucleotide for CAV1
tttttgtcgcgggaattt

SEQ ID NO: 785 - DNA, 18 bp, Artificial Sequence
  Detection oligonucleotide for CAV1
tttttgttgtgggaattt

SEQ ID NO: 786 - DNA, 18 bp, Artificial Sequence
  Detection oligonucleotide for CAV1
tagattcggaggtaggta

SEQ ID NO: 787 - DNA, 18 bp, Artificial Sequence
  Detection oligonucleotide for CAV1
tagatttggaggtaggta

SEQ ID NO: 788 - DNA, 18 bp, Artificial Sequence
  Detection oligonucleotide for CAV1
gaagtgttcgtttttgtt

SEQ ID NO: 789 - DNA, 18 bp, Artificial Sequence
  Detection oligonucleotide for CAV1
gaagtgtttgtttttgtt

SEQ ID NO: 790 - DNA, 18 bp, Artificial Sequence
  Detection oligonucleotide for CDH13
ttgtttagcgtgatttgt

SEQ ID NO: 791 - DNA, 18 bp, Artificial Sequence
  Detection oligonucleotide for CDH13
ttgtttagtgtgatttgt

SEQ ID NO: 792 - DNA, 18 bp, Artificial Sequence
  Detection oligonucleotide for CDH13
aaggaattcgttttgtaa

SEQ ID NO: 793 - DNA, 18 bp, Artificial Sequence
  Detection oligonucleotide for CDH13
aaggaatttgttttgtaa

SEQ ID NO: 794 - DNA, 18 bp, Artificial Sequence
  Detection oligonucleotide for CDH13
aatgttttcgtgatgttg

SEQ ID NO: 795 - DNA, 18 bp, Artificial Sequence
  Detection oligonucleotide for CDH13
aatgtttttgtgatgttg

SEQ ID NO: 796 - DNA, 18 bp, Artificial Sequence
  Detection oligonucleotide for NDRG1
gagtaggacggtgttaag

SEQ ID NO: 797 - DNA, 18 bp, Artificial Sequence
  Detection oligonucleotide for NDRG1
gagtaggatggtgttaag

SEQ ID NO: 798 - DNA, 18 bp, Artificial Sequence
  Detection oligonucleotide for NDRG1
aaatttaacgttgggtag

SEQ ID NO: 799 - DNA, 18 bp, Artificial Sequence
  Detection oligonucleotide for NDRG1
aaatttaatgttgggtag

SEQ ID NO: 800 - DNA, 18 bp, Artificial Sequence
  Detection oligonucleotide for NDRG1
gataatgacggtgttagt

SEQ ID NO: 801 - DNA, 18 bp, Artificial Sequence
  Detection oligonucleotide for NDRG1
gataatgatggtgttagt

SEQ ID NO: 802 - DNA, 18 bp, Artificial Sequence
  Detection oligonucleotide for NDRG1
tggttgtacgttaggagt

SEQ ID NO: 803 - DNA, 18 bp, Artificial Sequence
  Detection oligonucleotide for NDRG1
tggttgtatgttaggagt

SEQ ID NO: 804 - DNA, 18 bp, Artificial Sequence
  Detection oligonucleotide for PTGS2
gtttttatcgggtttacg

SEQ ID NO: 805 - DNA, 18 bp, Artificial Sequence
  Detection oligonucleotide for PTGS2
gtttttattgggtttatg

SEQ ID NO: 806 - DNA, 18 bp, Artificial Sequence
  Detection oligonucleotide for PTGS2
agttatttcgttatatgg

SEQ ID NO: 807 - DNA, 18 bp, Artificial Sequence
  Detection oligonucleotide for PTGS2
agttattttgttatatgg

SEQ ID NO: 808 - DNA, 18 bp, Artificial Sequence
  Detection oligonucleotide for PTGS2
aaagattgcgaagaagaa

SEQ ID NO: 809 - DNA, 18 bp, Artificial Sequence
  Detection oligonucleotide for PTGS2
aaagattgtgaagaagaa

SEQ ID NO: 810 - DNA, 18 bp, Artificial Sequence
  Detection oligonucleotide for PTGS2
atatttggcggaaatttg

SEQ ID NO: 811 - DNA, 18 bp, Artificial Sequence
  Detection oligonucleotide for PTGS2
atatttggtggaaatttg

SEQ ID NO: 812 - DNA, 18 bp, Artificial Sequence
  Detection oligonucleotide for THBS1
ttataaaacgggtttagt

SEQ ID NO: 813 - DNA, 18 bp, Artificial Sequence
  Detection oligonucleotide for THBS1
ttataaaatgggtttagt

SEQ ID NO: 814 - DNA, 18 bp, Artificial Sequence
  Detection oligonucleotide for THBS1
aggtatttcgggagatta

SEQ ID NO: 815 - DNA, 18 bp, Artificial Sequence
  Detection oligonucleotide for THBS1
aggtattttgggagatta

SEQ ID NO: 816 - DNA, 18 bp, Artificial Sequence
  Detection oligonucleotide for THBS1
gattagttcgttcgaaag

SEQ ID NO: 817 - DNA, 18 bp, Artificial Sequence
  Detection oligonucleotide for THBS1
gattagtttgtttgaaag

SEQ ID NO: 818 - DNA, 18 bp, Artificial Sequence
  Detection oligonucleotide for THBS1
agtttttgcgttatttcg

SEQ ID NO: 819 - DNA, 18 bp, Artificial Sequence
  Detection oligonucleotide for THBS1
agtttttgtgttattttg

SEQ ID NO: 820 - DNA, 18 bp, Artificial Sequence
  Detection oligonucleotide for TMEFF2
gatgttttcggtaattta

SEQ ID NO: 821 - DNA, 18 bp, Artificial Sequence
  Detection oligonucleotide for TMEFF2
gatgtttttggtaattta

SEQ ID NO: 822 - DNA, 18 bp, Artificial Sequence
  Detection oligonucleotide for TMEFF2
ataggttacgggttggag

SEQ ID NO: 823 - DNA, 18 bp, Artificial Sequence
  Detection oligonucleotide for TMEFF2
ataggttatgggttggag

SEQ ID NO: 824 - DNA, 18 bp, Artificial Sequence
  Detection oligonucleotide for TMEFF2
taaatttgcgaacgtttg

SEQ ID NO: 825 - DNA, 18 bp, Artificial Sequence
  Detection oligonucleotide for TMEFF2
taaatttgtgaatgtttg

SEQ ID NO: 826 - DNA, 18 bp, Artificial Sequence
  Detection oligonucleotide for PLAU
tgaggtttcgttttaaga

SEQ ID NO: 827 - DNA, 18 bp, Artificial Sequence
  Detection oligonucleotide for PLAU
tgaggttttgttttaaga

SEQ ID NO: 828 - DNA, 18 bp, Artificial Sequence
  Detection oligonucleotide for PLAU
ttggtttgcggttattta

SEQ ID NO: 829 - DNA, 18 bp, Artificial Sequence
  Detection oligonucleotide for PLAU
ttggtttgtggttattta

SEQ ID NO: 830 - DNA, 18 bp, Artificial Sequence
  Detection oligonucleotide for PLAU
gttatttacgtgtgtgga

SEQ ID NO: 831 - DNA, 18 bp, Artificial Sequence
  Detection oligonucleotide for PLAU
gttatttatgtgtgtgga

SEQ ID NO: 832 - DNA, 18 bp, Artificial Sequence
  Detection oligonucleotide for PLAU
tgtttatgcgtttatggt

SEQ ID NO: 833 - DNA, 18 bp, Artificial Sequence
  Detection oligonucleotide for PLAU
tgtttatgtgtttatggt

SEQ ID NO: 834 - DNA, 18 bp, Artificial Sequence
  Detection oligonucleotide for PLAU
ggataagtcgtgttttga

SEQ ID NO: 835 - DNA, 18 bp, Artificial Sequence
  Detection oligonucleotide for PLAU
ggataagttgtgttttga

SEQ ID NO: 836 - DNA, 18 bp, Artificial Sequence
  Detection oligonucleotide for TMEFF2
ttgttaaacgtttatcgg

SEQ ID NO: 837 - DNA, 18 bp, Artificial Sequence
  Detection oligonucleotide for TMEFF2
ttgttaaatgtttattgg

SEQ ID NO: 838 - DNA, 18 bp, Artificial Sequence
  Detection oligonucleotide for TMEFF2
gaagaatacgcgtattta

SEQ ID NO: 839 - DNA, 18 bp, Artificial Sequence
  Detection oligonucleotide for TMEFF2
gaagaatatgtgtattta

SEQ ID NO: 840 - DNA, 18 bp, Artificial Sequence
  Detection oligonucleotide for DNMT1
tagtaaatcgtggagttt

SEQ ID NO: 841 - DNA, 18 bp, Artificial Sequence
  Detection oligonucleotide for DNMT1
tagtaaattgtggagttt

SEQ ID NO: 842 - DNA, 18 bp, Artificial Sequence
  Detection oligonucleotide for DNMT1
agtgggttcgtttaagtt

SEQ ID NO: 843 - DNA, 18 bp, Artificial Sequence
  Detection oligonucleotide for DNMT1
agtgggtttgtttaagtt

SEQ ID NO: 844 - DNA, 18 bp, Artificial Sequence
  Detection oligonucleotide for DNMT1
tttttacgcggagtagtg

SEQ ID NO: 845 - DNA, 18 bp, Artificial Sequence
  Detection oligonucleotide for DNMT1
tttttacgtggagtagtg

SEQ ID NO: 846 - DNA, 18 bp, Artificial Sequence
  Detection oligonucleotide for DNMT1
gagagaggcgatattttg

SEQ ID NO: 847 - DNA, 18 bp, Artificial Sequence
  Detection oligonucleotide for DNMT1
gagagaggtgatattttg

SEQ ID NO: 848 - DNA, 18 bp, Artificial Sequence
  Detection oligonucleotide for ESR1
agatatatcggagtttgg

SEQ ID NO: 849 - DNA, 18 bp, Artificial Sequence
  Detection oligonucleotide for ESR1
agatatattggagtttgg

SEQ ID NO: 850 - DNA, 18 bp, Artificial Sequence
  Detection oligonucleotide for ESR1
gtttggtacggggtatat

SEQ ID NO: 851 - DNA, 18 bp, Artificial Sequence
  Detection oligonucleotide for ESR1
gtttggtatggggtatat

SEQ ID NO: 852 - DNA, 18 bp, Artificial Sequence
  Detection oligonucleotide for ESR1
ttagtagcgacgataagt

SEQ ID NO: 853 - DNA, 18 bp, Artificial Sequence
  Detection oligonucleotide for ESR1
ttagtagtgatgataagt

SEQ ID NO: 854 - DNA, 18 bp, Artificial Sequence
  Detection oligonucleotide for ESR1
tatgagttcgggagatta

SEQ ID NO: 855 - DNA, 18 bp, Artificial Sequence
  Detection oligonucleotide for ESR1
tatgagtttgggagatta

SEQ ID NO: 856 - DNA, 18 bp, Artificial Sequence
  Detection oligonucleotide for ESR1
tggaggttcgggagttta

SEQ ID NO: 857 - DNA, 18 bp, Artificial Sequence
  Detection oligonucleotide for ESR1
tggaggtttgggagttta

SEQ ID NO: 858 - DNA, 18 bp, Artificial Sequence
  Detection oligonucleotide for APAF1
tttggtatcgtttagagt

SEQ ID NO: 859 - DNA, 18 bp, Artificial Sequence
  Detection oligonucleotide for APAF1
tttggtattgtttagagt

SEQ ID NO: 860 - DNA, 18 bp, Artificial Sequence
  Detection oligonucleotide for APAF1
gtatgagtcgtggtagga

SEQ ID NO: 861 - DNA, 18 bp, Artificial Sequence
  Detection oligonucleotide for APAF1
gtatgagttgtggtagga

SEQ ID NO: 862 - DNA, 18 bp, Artificial Sequence
  Detection oligonucleotide for APAF1
gtggattcggcgggattt

SEQ ID NO: 863 - DNA, 18 bp, Artificial Sequence
  Detection oligonucleotide for APAF1
gtggatttggtgggattt

SEQ ID NO: 864 - DNA, 18 bp, Artificial Sequence
  Detection oligonucleotide for APAF1
tttagaggcggagaagaa

SEQ ID NO: 865 - DNA, 18 bp, Artificial Sequence
  Detection oligonucleotide for APAF1
tttagaggtggagaagaa

SEQ ID NO: 866 - DNA, 18 bp, Artificial Sequence
  Detection oligonucleotide for APAF1
gaagaggtagcgagtgga

SEQ ID NO: 867 - DNA, 18 bp, Artificial Sequence
  Detection oligonucleotide for APAF1
gaagaggtagtgagtgga

SEQ ID NO: 868 - DNA, 18 bp, Artificial Sequence
  Detection oligonucleotide for HOXA5
agttagtcgggttttaag

SEQ ID NO: 869 - DNA, 18 bp, Artificial Sequence
  Detection oligonucleotide for HOXA5
agttagttgggttttaag

SEQ ID NO: 870 - DNA, 18 bp, Artificial Sequence
  Detection oligonucleotide for HOXA5
ttatagggttcggttttt

SEQ ID NO: 871 - DNA, 18 bp, Artificial Sequence
  Detection oligonucleotide for HOXA5
ttatagggtttggttttt

SEQ ID NO: 872 - DNA, 18 bp, Artificial Sequence
  Detection oligonucleotide for HOXA5
ttttaaggcgaggttaaa

SEQ ID NO: 873 - DNA, 18 bp, Artificial Sequence
  Detection oligonucleotide for HOXA5
ttttaaggtgaggttaaa

SEQ ID NO: 874 - DNA, 18 bp, Artificial Sequence
  Detection oligonucleotide for HOXA5
atgataggcgtttattaa

SEQ ID NO: 875 - DNA, 18 bp, Artificial Sequence
  Detection oligonucleotide for HOXA5
atgataggtgtttattaa

SEQ ID NO: 876 - DNA, 18 bp, Artificial Sequence
  Detection oligonucleotide for RASSF1
gtagttttcgagaatgtt

SEQ ID NO: 877 - DNA, 18 bp, Artificial Sequence
  Detection oligonucleotide for RASSF1
gtagtttttgagaatgtt

SEQ ID NO: 878 - DNA, 18 bp, Artificial Sequence
  Detection oligonucleotide for RASSF1
ggaaatcggtaattagaa

SEQ ID NO: 879 - DNA, 18 bp, Artificial Sequence
  Detection oligonucleotide for RASSF1
ggaaattggtaattagaa

SEQ ID NO: 880 - DNA, 18 bp, Artificial Sequence
  Detection oligonucleotide for RASSF1
tttgtgtcgtcgggaaat

SEQ ID NO: 881 - DNA, 18 bp, Artificial Sequence
  Detection oligonucleotide for RASSF1
tttgtgttgttgggaaat

SEQ ID NO: 882 - DNA, 18 bp, Artificial Sequence
  Detection oligonucleotide for RASSF1
tagttttcgcgtagaatt

SEQ ID NO: 883 - DNA, 18 bp, Artificial Sequence
  Detection oligonucleotide for RASSF1
tagtttttgtgtagaatt

SEQ ID NO: 884 - DNA, 18 bp, Artificial Sequence
  Detection oligonucleotide for SFN
gagtaggtcgaacgttat

SEQ ID NO: 885 - DNA, 18 bp, Artificial Sequence
  Detection oligonucleotide for SFN
gagtaggttgaatgttat

SEQ ID NO: 886 - DNA, 18 bp, Artificial Sequence
  Detection oligonucleotide for CDH13
atgtaaaacgagggagcg

SEQ ID NO: 887 - DNA, 18 bp, Artificial Sequence
  Detection oligonucleotide for CDH13
atgtaaaatgagggagtg

SEQ ID NO: 888 - DNA, 18 bp, Artificial Sequence
  Detection oligonucleotide for SFN
aaaagtaacgaggagggt

SEQ ID NO: 889 - DNA, 18 bp, Artificial Sequence
  Detection oligonucleotide for SFN
aaaagtaatgaggagggt

SEQ ID NO: 890 - DNA, 18 bp, Artificial Sequence
  Detection oligonucleotide for MGMT
taggttatcggtgattgt

SEQ ID NO: 891 - DNA, 18 bp, Artificial Sequence
  Detection oligonucleotide for MGMT
taggttattggtgattgt

SEQ ID NO: 892 - DNA, 18 bp, Artificial Sequence
  Detection oligonucleotide for CDKN1C
atgaagaacggttaaggg

SEQ ID NO: 893 - DNA, 18 bp, Artificial Sequence
  Detection oligonucleotide for CDKN1C
atgaagaatggttaaggg

SEQ ID NO: 894 - DNA, 18 bp, Artificial Sequence
  Detection oligonucleotide for HLA-F
tatttgggcgggtgagtg

SEQ ID NO: 895 - DNA, 18 bp, Artificial Sequence
  Detection oligonucleotide for HLA-F
tatttgggtgggtgagtg

SEQ ID NO: 896 - DNA, 18 bp, Artificial Sequence
  Detection oligonucleotide for CDKN2a
ggagttttcggttgattg

SEQ ID NO: 897 - DNA, 18 bp, Artificial Sequence
  Detection oligonucleotide for CDKN2a
ggagtttttggttgattg

SEQ ID NO: 898 - DNA, 18 bp, Artificial Sequence
  Detection oligonucleotide for GPIb beta
tttgagagcgggtgggag

SEQ ID NO: 899 - DNA, 18 bp, Artificial Sequence
  Detection oligonucleotide for GPIb beta
tttgagagtgggtgggag

SEQ ID NO: 900 - DNA, 18 bp, Artificial Sequence
  Detection oligonucleotide for MYC
gagggatcgcgttgagta

SEQ ID NO: 901 - DNA, 18 bp, Artificial Sequence
  Detection oligonucleotide for MYC
gagggattgtgttgagta

SEQ ID NO: 902 - DNA, 18 bp, Artificial Sequence
  Detection oligonucleotide for PAX6
tattgtttcggttgttag

SEQ ID NO: 903 - DNA, 18 bp, Artificial Sequence
  Detection oligonucleotide for PAX6
tattgttttggttgttag

SEQ ID NO: 904 - DNA, 18 bp, Artificial Sequence
  Detection oligonucleotide for GPIb beta
gtgggagcggaagtttga

SEQ ID NO: 905 - DNA, 18 bp, Artificial Sequence
  Detection oligonucleotide for GPIb beta
gtgggagtggaagtttga

SEQ ID NO: 906 - DNA, 18 bp, Artificial Sequence
  Detection oligonucleotide for RARB
tagtagttcgggtagggt

SEQ ID NO: 907 - DNA, 18 bp, Artificial Sequence
  Detection oligonucleotide for RARB
tagtagtttgggtagggt

SEQ ID NO: 908 - DNA, 18 bp, Artificial Sequence
  Detection oligonucleotide for TMEFF2
gtgaagttcgttgttttt

SEQ ID NO: 909 - DNA, 18 bp, Artificial Sequence
  Detection oligonucleotide for TMEFF2
gtgaagtttgttgttttt

SEQ ID NO: 910 - DNA, 18 bp, Artificial Sequence
  Detection oligonucleotide for PTGS2
ttggttttcggaagcgtt

SEQ ID NO: 911 - DNA, 18 bp, Artificial Sequence
  Detection oligonucleotide for PTGS2
ttggtttttggaagtgtt

SEQ ID NO: 912 - DNA, 18 bp, Artificial Sequence
  Detection oligonucleotide for LKB1
agggaggtcgttggtatt

SEQ ID NO: 913 - DNA, 18 bp, Artificial Sequence
  Detection oligonucleotide for LKB1
agggaggttgttggtatt

SEQ ID NO: 914 - DNA, 18 bp, Artificial Sequence
  Detection oligonucleotide for CDKN1B
tttgatttcgaggggagt

SEQ ID NO: 915 - DNA, 18 bp, Artificial Sequence
  Detection oligonucleotide for CDKN1B
tttgattttgaggggagt

SEQ ID NO: 916 - DNA, 18 bp, Artificial Sequence
  Detection oligonucleotide for VHL
ggtgttttcgtgtgagat

SEQ ID NO: 917 - DNA, 18 bp, Artificial Sequence
  Detection oligonucleotide for VHL
ggtgtttttgtgtgagat
